(19) United States
(12) Patent Application Publication
(10) Pub. No.: US 2023/0146665 A1
(43) Pub. Date: May 11, 2023

(54) IL-18-FC FUSION PROTEINS

(71) Applicant: Xencor, Inc., Monrovia, CA (US)

(72) Inventors: Alex Nisthal, Monrovia, CA (US); John Desjarlais, Pasadena, CA (US); Gregory Moore, Azusa, CA (US); Sung-Hyung Lee, San Gabriel, CA (US)

(21) Appl. No.: 17/815,194

(22) Filed: Jul. 26, 2022

Related U.S. Application Data
(60) Provisional application No. 63/226,093, filed on Jul. 27, 2021.
(60) Provisional application No. 63/310,519, filed on Feb. 15, 2022.
(60) Provisional application No. 63/327,705, filed on Apr. 5, 2022.

(51) Int. Cl. C07K 14/54

(52) U.S. Cl. CPC C07K 14/54; C07K 2319/30

(57) ABSTRACT

Provided herein are IL18-Fc fusion proteins that include an empty-Fc domain and an IL18 protein connected to another Fc domain. Also provided herein are additional are IL18-Fc fusion proteins such as IL18 x Fab-Fc fusion proteins that include a first monomer containing an IL18 protein connected to a first Fc domain, a second monomer containing a variable heavy chain connected to a second Fc domain, and a variable light chain, such that the variable heavy and light chains form an empty Fab. Various variant IL18 proteins with modifications to reduce heterogeneity and/or reduce affinity/potency and/or improve stability and/or improve production yield are also described.

### PRIORITY CLAIM

[0001] This application claims priority to U.S. Provisional Patent Application No. 63/226,093, filed Jul. 27, 2021, U.S. Provisional Patent Application No. 63/310,519, filed Feb. 15, 2022 and U.S. Provisional Patent Application No. 63/327,705, filed Apr. 5, 2022, which are hereby incorporated by reference in their entireties.

### SEQUENCE LISTING

[0002] The instant application contains a Sequence Listing which has been submitted electronically in ST.26 XML format and is hereby incorporated by reference in its entirety. Said ST.26 XML format file was created on Jul. 25, 2022, is named 067461-5291-WO SL.txt and is 2,108,595 bytes in size

### BACKGROUND

[0003] In order for the immune system to mount an effective anti-tumor response, two things must occur. T cells in the tumor environment must first engage antigenic tumor peptides presented by major histocompatibility complexes (MHC) on tumor cells. Next, the T cells must be induced by cytokines such as IL-15 and IL-2 to produce costimulatory cytokines such as IFNy. Recognition of tumor peptides alone in the absence of cytokine induction leads to T cells becoming anergic, thereby leading to tolerance. Accordingly, a very promising approach in cancer immunotherapy is cytokine-based treatments. For example, IL-2 has been approved for use in patients with metastatic renal-cell carcinoma and malignant melanoma.

[0004] IL18 is proinflammatory cytokine that exerts cell signaling upon binding to the IL18 receptor IL18R1 and the IL18 receptor accessory protein (IL18RAP) to form a ternary signaling complex which activates NF-kappa-B, and in turn activates synthesis of inflammatory mediators. The activity of IL18 can be suppressed by the IL18 binding protein (IL18BP) which binds to IL18 and prevents it from binding to the IL18 receptor. Recombinant IL18 is a promising cytokine-treatment due to its broad effect in activating the immune system as IL-18 signaling contributes to cytokine production and immune response by Th1 and Th2 lymphocytes. Thus, there remains a need for novel IL18 based compositions for the treatment of cancers.

### BRIEF SUMMARY

[0005] In some aspects, provided herein is a composition comprising a variant human IL18 protein, wherein the variant IL18 protein comprises a modification at one or more amino acid positions selected from the group consisting of Y1, E6, S7, K8, S10, V11, N14, L15, D17, Q18, D23, R27, P28, L29, E31, M33, T34, D35, S36, D37, C38, R39, D40, N41, R44, I46, I49, S50, M51, K53, D54, S55, Q56, P57, M60, A61, V62, T63, S65, K67, C68, E69, I71, C76, E77, I80, I81, N87, P88, D90, K93, T95, K96, S97, Q103, H109, D110, N111, M113, S119, A126, C127, D132, L136, L138, K139, E141, L144, D146, R147, I149, M150, N155, E156, and D157, as compared to wildtype human IL18.

[0006] In some embodiments, the variant human IL18 protein of the composition comprises an additional 1, 2, 3, 4, 5, 6, 7, 8, 9, or 10 amino acid modifications.

[0007] In some embodiments, the variant human IL18 protein of the composition comprising one or more amino acid substitutions selected from the group consisting of Y1F, Y1H, E6A, E6Q, S7C, S7P, K8E, K8Q, K8Y, S10C, V11I, N14C, N14W, L15C, D17N, Q18L, D23N, D23S, R27Q, P28C, L29V, E31Q, M33C, T34P, D35N, D35E, S36D, S36N, D37N, C38S, C38Q, C38R, C38E, C38L, C38I, C38V, C38K, C38D, R39S, R39T, D40N, N41Q, R44Q, I46V, I49C, S50C, S50Y, M51I, M51K, M51Q, M51R, M51L, M51H, M51F, M51Y, K53A, K53D, K53E, K53G, K53H, K53I, K53L, K53M, K53N, K53Q, K53R, K53S, K53T, K53V, K53Y, K53F, D54C, S55N, S55Q, S55D, S55E, S55T, Q56I, Q56L, P57A, P57E, P57T, P57V, P57Q, P57D, P57Y, P57N, M60I, M60L, M60K, M60Y, M60F, A61C, V62C, T63C, S65C, K67Q, C68S, C68I, C68F, C68Y, C68D, C68N, C68E, C68Q, C68K, E69K, I71M, C76S, C76E, C76K, E77K, 180T, I81L, I81V, N87S, P88C, D90E, K93D, K93N, T95E, K96G, K96Q, S97N, Q103C, Q103E, Q103I, Q103L, H109W, H109Y, D110N, D110Q, D110R, N111D, N111Q, N111S, N111T, N111E, M113I, S119L, A126C, C127S, C127W, C127Y, C127F, C127D, C127E, C127K, D132Q, D132E, L136C, L138C, K139C, E141K, E141Q, L144N, D146F, D146L, D146Y, R147C, R147K, I149V, M150F, M150T, N155C, E156Q, D157A, D157S, D157N, and D157del, as compared to wildtype human IL18. In some embodiments, the amino acid substitution can include 4CS, 4CS/D193S, 4CS/D193A, 4CS/delD193, 4CS/S38E, 4CS/S68E, 4CS/S76E, 4CS/S127E, 4CS/S38K, 4CS/S68K, 4CS/S76K, 4CS/S127K, 4CS/S38D, 4CS/Y1F, 4CS/Y1H, 4CS/E6A, 4CS/E6Q, 4CS/D17N, 4CS/E31Q, 4CS/D35N, 4CS/D37N, 4CS/D40N, 4CS/N41Q, 4CS/K53R, 4CS/K53H, 4CS/K53M, 4CS/K53E, 4CS/K53Q, 4CS/K53A, 4CS/Q103E, 4CS/D110N, 4CS/N111Q, 4CS/E6A/K53A, 4CS/N14C/E31Q/S127C, 4CS/E31Q/K53A, 4CS/E31Q/D35N/K53A, 4C S/E31Q/N41Q/K53A, 4CS/E31Q/D35N/N41Q/K53A, 4CS/E31Q/D35N, 4CS/E31Q/N41Q, 4CS/E31Q/D35N/N41Q, 4CS/E31Q/D37N, 4CS/E31Q/D37N/K53A, 4C S/E31Q/M33C/S38C, 4CS/E31Q/S76C/L138C, 4CS/E31Q/S68I, 4CS/E31Q/S68F, 4CS/E31Q/S127W, 4C S/E31Q/S127Y, 4CS/E31Q/S127F, 4CS/S10C/E31Q/I49C, 4C S/L15C/E31Q/R147C, 4C S/P28C/E31Q/L136C, 4CS/E31Q/S50C/P88C, 4CS/E31Q/T63C/P88C, 4C S/E31Q/V62C/Q103C, 4CS/S10C/E31Q/N155C, 4CS/E31Q/S65C/P88C, 4CS/S7C/E31Q/S50C, 4CS/E31Q/D54C/A61C, 4C S/E31Q/A126C/K139C, 4CS/N14W/E31Q, 4CS/E31Q/D146Y, 4CS/E31Q/D146L, 4C S/E31Q/D146F, 4C S/E31Q/Q103L, 4CS/E31Q/Q103I, 4CS/E31Q/M150F, 4CS/Q18L/E31Q, 4CS/E31Q/S68Y, 4CS/E31Q/S38Q, 4C S/E31Q/S38R, 4CS/E31Q/S68D, 4CS/S7P/E31Q, 4CS/V11I/E31Q, 4CS/D23N/E31Q, 4CS/D23S/E31Q, 4CS/R27Q/E31Q, 4CS/L29V/E31Q, 4CS/E31Q/T34P, 4CS/E31Q/R39T, 4CS/E31Q/R39S, 4CS/E31Q/R44Q, 4CS/E31Q/I46V, 4CS/E31Q/S50Y, 4CS/E31Q/Q56L, 4CS/E31Q/Q56L/P57T, 4C S/E31Q/P57T, 4CS/E31Q/P57V, 4CS/E31Q/M60L, 4CS/E31Q/K67Q, 4CS/E31Q/E69K, 4CS/E31Q/I71M, 4CS/E31Q/E77K, 4CS/E31Q/I80T, 4CS/E31Q/I81V, 4CS/E31Q/I81L, 4C S/E31Q/N87S, 4CS/E31Q/D90E, 4CS/E31Q/K93D/T95E, 4CS/E31Q/K93N/T95E, 4CS/E31Q/T95E, 4CS/E31Q/K96G, 4CS/E31Q/S97N, 4CS/E31Q/N111D, 4CS/E31Q/M113I, 4CS/E31Q/S119L, 4CS/E31Q/L144N, 4CS/E31Q/R147K, 4CS/E31Q/I149V, 4CS/E31Q/M150T, 4CS/E31Q/E156Q/D157N, 4CS/K53S, 4CS/K53G, 4CS/K53T, 4CS/K53I, 4CS/K53L, 4CS/K53N, 4CS/K53D, 4CS/M51K, 4CS/M51Q, 4CS/M51I, 4CS/S55N, 4CS/S55Q, 4CS/Q56L, 4CS/Q56I, 4CS/P57A, 4CS/P57E, 4CS/M60L, 4CS/M60I, 4CS/K8Y, 4CS/K8Q, 4CS/K8E, 4CS/H109W, 4CS/H109Y, 4CS/E31Q/S38E, 4CS/E31Q/S38L, 4CS/E31Q/S38I, 4C S/E31Q/S38V, 4C S/E31Q/S68N, 4CS/E31Q/S68E, 4CS/E31Q/S68Q, 4C S/E31Q/S76C, 4CS/E31Q/S127D, 4CS/E31Q/S127E, 4CS/D23N/E31Q/R27Q, 4CS/E31Q/Q56L/T95E, 4CS/E31Q/K96Q/S119L, 4CS/E31Q/E141K/I149V, 4CS/E31Q/E141Q/I149V, 4CS/S7P/E31Q/S50Y, 4C S/E31Q/I80T/I81L/delD193, 4C S/E31Q/P57A/S119L/delD193, 4CS/E31Q/P57A/180T/181L/S119L/delD193, 4C S/E31Q/P57A/K93D/T95E/S119L/delD193, 4C S/E31Q/I80T/S119L/delD193, 4C S/E31Q/I80T/I81L/K93D/T95E/delD193, 4CS/E31Q/P57A/180T/181L/K93D/T95E/S119L/delD193, 4CS/S7C/E31Q/S50C/delD193, 4CS/S7C/E31Q/S50C/P57A/delD193, 4CS/S7C/E31Q/S50C/S119L/delD193, 4CS/S7C/E31Q/S50C/I80T/delD193, 4CS/S7C/E31Q/S50C/I80T/S119L/delD193, 4C S/S7C/E31Q/S50C/P57A/I80T/S119L/delD193, 4C S/S10C/E31Q/N155C/delD193, 4C S/S10C/E31Q/P57A/N155C/delD193, 4C S/S10C/E31Q/S119L/N155C/delD193, 4C S/S10C/E31Q/I80T/N155C/delD193, 4C S/S10C/E31Q/I80T/S119L/N155C/delD193, 4C S/S10C/E31Q/P57A/I80T/S119L/N155C/delD193, 4C S/S10C/E31Q/I49C/delD193, 4C S/L15C/E31Q/R147C/delD193, 4C S/E31Q/T63C/P88C/delD193, 4CS/N14C/E31Q/S127C/delD193, 4CS/E31Q/S38R/S127W/delD193, 4CS/S10C/D35E/N155C, 4CS/S10C/S36D/N155C, 4CS/S10C/S36N/N155C, 4CS/S10C/K53V/N155C, 4CS/S10C/K53Y/N155C, 4CS/S10C/K53F/N155C, 4CS/S10C/M51R/N155C, 4CS/S10C/M51L/N155C, 4CS/S10C/M51H/N155C, 4CS/S10C/M51F/N155C, 4CS/S10C/M51Y/N155C, 4CS/S10C/S55D/N155C, 4CS/S10C/S55E/N155C, 4CS/S10C/S55T/N155C, 4CS/S10C/P57Q/N155C, 4CS/S10C/P57D/N155C, 4CS/S10C/P57Y/N155C, 4CS/S10C/P57N/N155C, 4CS/S10C/M60Y/N155C, 4CS/S10C/M60F/N155C, 4CS/S10C/D110Q/N155C, 4CS/S10C/D110R/N155C, 4CS/S10C/N111D/N155C, 4CS/S10C/N111S/N155C, 4CS/S10C/N111T/N155C, 4CS/S10C/N111E/N155C, 4CS/S10C/D132Q/N155C, 4CS/S10C/D132EN155C, 4CS/E6Q/S10C/K53D/N155C, 4CS/E6Q/S10C/M51K/K53D/N155C, 4CS/S10C/E31Q/D35N/N41Q/K53A/N155C, 4CS/S10C/E31Q/N41Q/K53A/N155C, 4CS/S10C/E31Q/K53A/N155C, 4CS/S10C/K53T/N155C, 4CS/S10C/P57A/N155C, 4CS/S10C/N155C, 4CS/S10C/S76G/N155C, 4CS/S10C/S76A/N155C, 4CS/S10C/M51K/K53D/N155C, 4CS/S10C/M51K/K53E/N155C, 4CS/E6Q/S10C/K53E/N155C, 4CS/E6Q/S10C/M51K/K53E/N155C, 4CS/E6Q/S10C/M51K/P57E/N155C, 4CS/S10C/M51K/P57E/N155C, 4CS/E6Q/S10C/P57E/N155C, 4CS/S10C/E31Q/K53T/N155C, 4CS/S10C/K53G/P57E/N155C, 4CS/S10C/K53T/P57E/N155C, 4CS/S10C/K53A/P57E/N155C, 4CS/S10C/P57E/N155C, 4CS/S10C/K53D/N155C, 4CS/S10C/E31Q/N41Q/N155C, 4CS/S10C/K53A/N155C, 4CS/S10C/K53G/N155C, 4CS/S10C/K53E/N155C, 4CS/S10C/K53S/N155C, 4CS/S10C/M51L/K53D/N155C, 4CS/S10C/K53D/D110R/N155C, 4CS/S10C/K53D/N111T/N155C, 4CS/S10C/K53D/S55T/N155C, 4CS/S10C/K53D/S55T/D110R/N155C, 4CS/S10C/M51L/K53D/S55T/D110R/N111T/N155C, 4CS/S10C/M51L/K53D/S55T/D110R/N155C, 4CS/S10C/K53D/S55T/D110R/N111T/N155C, 4CS/S10C/K53D/S55T/N111T/N155C, 4CS/S10C/E31Q/D35N/N155C, 4CS/S10C/N41Q/N155C, 4CS/S10C/D35N/N155C, 4CS/S10C/D37N/N155C, 4CS/S10C/E31Q/D37N/N155C, 4CS/S10C/D35N/D37N/N155C, 4CS/E6Q/S10C/M51L/K53D/S55T/D110R/N111T/N155C, 4CS/S10C/K53D/H109Y/N155C, 4CS/S10C/D37N/K53D/N155C, 4CS/S10C/D35N/K53D/N155C, 4CS/K8E/S10C/K53D/N155C, 4CS/S10C/E31Q/K53D/N155C, 4CS/S10C/N41Q/K53D/N155C, 4CS/S10C/K53D/P57V/N155C, 4CS/S10C/K53D/P57T/N155C, 4CS/E6Q/S10C/K53D/N111T/N155C, E6A/K53A, D35N/K53A, N41Q/K53A, D35N/N41Q/K53A, D35N/N41Q, D37N/K53A, E6Q/K53D, E6Q/M51K/K53D, M51K/K53D, M51K/K53E, E6Q/K53E, E6Q/M51K/K53E, E6Q/M51K/P57E, M51K/P57E, E6Q/P57E, K53G/P57E, K53T/P57E, K53A/P57E, M51L/K53D, K53D/D110R, K53D/N111T, K53D/S55T, K53D/S55T/D110R, M51L/K53D/S55T/D110R/N111T, M51L/K53D/S55T/D110R, K53D/S55T/D110R/N111T, K53D/S55T/N111T, D35N/D37N, E6Q/M51L/K53D/S55T/D110R/N111T, K53D/H109Y, D37N/K53D, D35N/K53D, K8E/K53D, N41Q/K53D, K53D/P57V, K53D/P57T, E6Q/K53D/N111T, Q56L/P57T, K93D/T95E, K93N/T95E, E156Q/D157N, D23N/R27Q, Q56L/T95E, K96Q/S119L, E141K/I149V, E141Q/I149V, S7P/S50Y, I80T/I81L, P57A/S119L, P57A/I80T/I81L/S119L, P57A/K93D/T95E/S119L, I80T/S119L, I80T/I81L/K93D/T95E, P57A/I80T/I81L/K93D/T95E/S119L, P57A/I80T/S119L, N14C/S127C, M33C/S38C, S76C/L138C, S10C/I49C, L15C/R147C, P28C/L136C, S50C/P88C, T63C/P88C, V62C/Q103C, S10C/N155C, S65C/P88C, S7C/S50C, D54C/A61C, A126C/K139C, C38R/C127W, E31Q/K53A, E31Q/D35N/K53A, E31Q/N41Q/K53A, E31Q/D35N/N41Q/K53A, E31Q/D35N, E31Q/N41Q, E31Q/D35N/N41Q, E31Q/D37N, E31Q/D37N/K53A, S10C/E31Q/I49C, L15C/E31Q/R147C, P28C/E31Q/L136C, E31Q/S50C/P88C, E31Q/T63C/P88C, E31Q/V62C/Q103C, S10C/E31Q/N155C, E31Q/S65C/P88C, S7C/E31Q/S50C, E31Q/D54C/A61C, E31Q/A126C/K139C, N14W/E31Q, E31Q/D146Y, E31Q/D146L, E31Q/D146F, E31Q/Q103L, E31Q/Q103I, E31Q/M150F, Ql8L/E31Q, S7P/E31Q, V11I/E31Q, D23N/E31Q, D23 S/E31Q, R27Q/E31Q, L29V/E31Q, E31Q/T34P, E31Q/R39T, E31Q/R39S, E31Q/R44Q, E31Q/I46V, E31Q/S50Y, E31Q/Q56L, E31Q/Q56L/P57T, E31Q/P57T, E31Q/P57V, E31Q/M60L, E31Q/K67Q, E31Q/E69K, E31Q/I71M, E31Q/E77K, E31Q/I80T, E31Q/I81V, E31Q/I81L, E31Q/N87S, E31Q/D90E, E31Q/K93D/T95E, E31Q/K93N/T95E, E31Q/T95E, E31Q/K96G, E31Q/S97N, E31Q/N111D, E31QN1113I, E31Q/S119L, E31Q/L144N, E31Q/R147K, E31Q/I149V, E31Q/M150T, E31Q/E156Q/D157N, D23N/E31Q/R27Q, E31Q/Q56L/T95E, E31Q/K96Q/S119L, E31Q/E141K/I149V, E31Q/E141Q/I149V, S7P/E31Q/S50Y, E31Q/180T/181L/delD193, E31Q/P57A/S119L/delD193, E31Q/P57A/I80T/I81L/S119L/delD193, E31Q/P57A/K93D/T95E/S119L/delD193, E31Q/I80T/S119L/delD193, E31Q/I80T/I81L/K93D/T95E/delD193, E31Q/P57A/180T/181L/K93D/T95E/S119L/delD193, S7C/E31Q/S50C/delD193, S7C/E31Q/S50C/P57A/delD193, S7C/E31Q/S50C/S119L/delD193, S7C/E31Q/S50C/I80T/delD193, S7C/E31Q/S50C/I80T/S119L/delD193, S7C/E31Q/S50C/P57A/I80T/S119L/delD193, S10C/E31Q/N155C/delD193, S10C/E31Q/P57A/N155C/delD193, S10C/E31Q/S119L/N155C/delD193, S10C/E31Q/I80T/N155C/delD193, S10C/E31Q/I80T/S119L/N155C/delD193, S10C/E31Q/P57A/I80T/S119L/N155C/delD193, S10C/E31Q/I49C/delD193, L15C/E31Q/R147C/delD193, E31Q/T63C/P88C/delD193, S10C/D35E/N155C, S10C/S36D/N155C, S10C/S36N/N155C, S10C/K53V/N155C, S10C/K53Y/N155C, S10C/K53F/N155C, S10C/M51R/N155C, S10C/M51L/N155C, S10C/M51H/N155C, S10C/M51F/N155C, S10C/M51Y/N155C, S10C/S55D/N155C, S10C/S55E/N155C, S10C/S55T/N155C, S10C/P57Q/N155C, S10C/P57D/N155C, S10C/P57Y/N155C, S10C/P57N/N155C, S10C/M60Y/N155C, S10C/M60F/N155C, S10C/D110Q/N155C, S10C/D110R/N155C, S10C/N111D/N155C, S10C/N111S/N155C, S10C/N111T/N155C, S10C/N111E/N155C, S10C/D132Q/N155C, S10C/D132E/N155C, E6Q/S10C/K53D/N155C, E6Q/S10C/M51K/K53D/N155C, S10C/E31Q/D35N/N41Q/K53A/N155C, S10C/E31Q/N41Q/K53A/N155C, S10C/E31Q/K53A/N155C, S10C/K53T/N155C, S10C/P57A/N155C, S10C/M51K/K53D/N155C, S10C/M51K/K53E/N155C, E6Q/S10C/K53E/N155C, E6Q/S10C/M51K/K53E/N155C, E6Q/S10C/M51K/P57E/N155C, S10C/M51K/P57E/N155C, E6Q/S10C/P57E/N155C, S10C/E31Q/K53T/N155C, S10C/K53G/P57E/N155C, S10C/K53T/P57E/N155C, S10C/K53A/P57E/N155C, S10C/P57E/N155C, S10C/K53D/N155C, S10C/E31Q/N41Q/N155C, S10C/K53A/N155C, S10C/K53G/N155C, S10C/K53E/N155C, S10C/K53S/N155C, S10C/M51L/K53D/N155C, S10C/K53D/D110R/N155C, S10C/K53D/N111TN155C, S10C/K53D/S55T/N155C, S10C/K53D/S55T/D110R/N155C, S10C/M51L/K53D/S55T/D110R/N111T/N155C, S10C/M51L/K53D/S55T/D110R/N155C, S10C/K53D/S55T/D110R/N111T/N155C, S10C/K53D/S55T/N111T/N155C, S10C/E31Q/D35N/N155C, S10C/N41Q/N155C, S10C/D35N/N155C, S10C/D37N/N155C, S10C/E31Q/D37N/N155C, S10C/D35N/D37N/N155C, E6Q/S10C/M51L/K53D/S55T/D110R/N111TN155C, S10C/K53D/H109Y/N155C, S10C/D37N/K53D/N155C, S10C/D35N/K53D/N155C, K8E/S10C/K53D/N155C, S10C/E31Q/K53D/N155C, S10C/N41Q/K53DN155C, S10C/K53D/P57V/N155C, S10C/K53D/P57T/N155C, or E6Q/S10C/K53D/N111T/N155C.

[0008] In some embodiments, the variant human IL18 protein exhibits reduced binding affinity to the IL18 receptor 1 (IL18R1), IL18 receptor accessory protein (IL18RAP), IL18R1:IL18RAP complex and/or the IL18 binding protein (IL18BP), compared to wildtype human IL18. In some embodiments, the variant human IL18 protein exhibits reduced heterogeneity compared to wildtype human IL18. In some embodiments, the variant human IL18 protein exhibits improved production yield compared to wildtype human IL18. In some embodiments, the variant human IL18 protein exhibits improved stability compared to wildtype human IL18. In some embodiments, the variant human IL18 protein exhibits modulated potency, compared to wildtype human IL18. In some embodiments, the variant human IL18 protein exhibits reduced IL18BP sink compared to wildtype human IL18.

[0009] Provided herein is a nucleic acid encoding any one of the variant human IL18 proteins described herein. Provided herein is an expression vector comprising any one of the nucleic acids described. Provided herein is a host cell comprising any one of the nucleic acids described or any one of the expression vectors described. In some embodiments, provided herein is a method of making a variant human IL18 protein comprising culturing any one of the host cells described herein and recovering the variant human IL18.

[0010] In some aspects, provided herein is a monovalent Fc fusion protein comprising: (a) a first monomer comprising from N-terminus to C-terminus: a wildtype or variant IL-18 protein and a first Fc domain; and (b) a second monomer comprising a second Fc domain.

[0011] In some embodiments of the monovalent Fc fusion protein, the first Fc domain further comprises a set of amino acid substitutions Q295E/N384D/Q418E/N421D, according to EU numbering. In some embodiments, first and/or second Fc domains further comprise an amino acid modification of K447del, according to EU numbering. In some embodiments, the first and/or second Fc domains further comprise a set of amino acid modifications selected from the group consisting of C219S, C220S, S228P, G236R/L328R, E233P/L234V/L235A/G236del/S239K, E233P/L234V/L235A/G236del/S239K/A327G, E233P/L234V/L235A/G236del/S267K/A327G, E233P/L234V/L235A/G236de1, E233P/L234V/L235A/G236del/S267K, and C220S/ E233P/L234V/L235A/G236del/S267K, according to EU numbering. In some embodiments, the first and second Fc domains each further comprises amino acid modifications C220S/E233P/L234V/L235A/G236del/S267K, according to EU numbering. In some embodiments, the first Fc domain and the second Fc domain have a set of amino acid substitutions selected from the group consisting of: (i) S267K/L368D/K370S: S267K/S364K/E357Q; (ii) S364K/E357Q: L368D/K370S; (iii) L368D/K370S: S364K; (iv) L368E/K370S: S364K; (v) T411E/K360E/Q362E: D401K; (vi) L368D/K370S: S364K/E357Q, and (vii) K370S: S364K/E357Q, according to EU numbering. In some embodiments, the first and second Fc domains further comprise amino acid substitutions M428L/N434S, according to EU numbering.

[0012] In some embodiments, the wildtype or variant IL-18 protein is covalently attached to the N-terminus of the first Fc domain. In some embodiments, the wildtype or variant IL-18 protein is covalently attached to a domain linker which is covalently attached to the N-terminus of the first Fc domain. In some embodiments, the domain linker is selected from any one of the domain linkers in FIG. 8.

[0013] In some embodiments, the wildtype IL18 protein has an amino acid sequence selected from the group consisting of SEQ ID NO:1 (human precursor IL18) and SEQ ID NO:2 (human mature IL18).

[0014] In some embodiments, the variant IL18 protein has at least 90% sequence identity to an amino acid sequence selected from the group consisting of SEQ ID NO:1 (human precursor IL18) and SEQ ID NO:2 (human mature IL18).

[0015] In some embodiments, the variant IL18 protein comprises a modification at one or more amino acid positions selected from the group consisting of Y1, E6, S7, K8, S10, V11, N14, L15, D17, Q18, D23, R27, P28, L29, E31, M33, T34, D35, S36, D37, C38, R39, D40, N41, R44, I46, I49, S50, M51, K53, D54, S55, Q56, P57, M60, A61, V62, T63, S65, K67, C68, E69, I71, C76, E77, I80, I81, N87, P88, D90, K93, T95, K96, S97, Q103, H109, D110, N111, M113, S119, A126, C127, D132, L136, L138, K139, E141, L144, D146, R147, I149, M150, N155, E156, and D157, as compared to wildtype human IL18.

[0016] In some embodiments, the variant IL18 protein comprises one or more amino acid substitutions selected from the group consisting of Y1F, Y1H, E6A, E6Q, S7C, S7P, K8E, K8Q, K8Y, S10C, V11I, N14C, N14W, L15C, D17N, Q18L, D23N, D23S, R27Q, P28C, L29V, E31Q, M33C, T34P, D35N, D35E, S36D, S36N, D37N, C38S, C38K, C38D, C38Q, C38R, C38E, C38L, C381, C38V, R39S, R39T, D40N, N41Q, R44Q, I46V, I49C, S50C, S50Y, M51I, M51K, M51Q, M51R, M51L, M51H, M51F, M51Y, K53A, K53D, K53E, K53G, K53H, K531, K53L, K53M, K53N, K53Q, K53R, K53S, K531, K53V, K53Y, K53F, D54C, S55N, S55Q, S55D, S55E, S551, Q561, Q56L, P57A, P57E, P571, P57V, P57Q, P57D, P57Y, P57N, M60I, M60L, M60K, M60Y, M60F, A61C, V62C, T63C, S65C, K67Q, C68S, C681, C68F, C68Y, C68D, C68N, C68E, C68Q, C68K, E69K, I71M, C76S, C76E, C76K, E77K, 180T, I81L, I81V, N87S, P88C, D90E, K93D, K93N, T95E, K96G, K96Q, S97N, Q103C, Q103E, Q103I, Q103L, H109W, H109Y, D110N, D110Q, D110R, N111D, N111Q, N111S, N111T, N111E, M113I, S119L, A126C, C127S, C127W, C127Y, C127F, C127D, C127E, C127K, D132Q, D132E, L136C, L138C, K139C, E141K, E141Q, L144N, D146F, D146L, D146Y, R147C, R147K, I149V, M150F, M150T, N155C, E156Q, D157A, D157S, D157N, and D157del, as compared to wildtype human IL18. In some embodiments, the amino acid substitution can include 4CS, 4CS/D193S, 4CS/D193A, 4CS/delD193, 4CS/S38E, 4CS/S68E, 4CS/S76E, 4CS/S127E, 4CS/S38K, 4CS/S68K, 4CS/S76K, 4CS/S127K, 4CS/S38D, 4CS/Y1F, 4CS/Y1H, 4CS/E6A, 4CS/E6Q, 4CS/D17N, 4CS/E31Q, 4CS/D35N, 4CS/D37N, 4CS/D40N, 4CS/N41Q, 4CS/K53R, 4CS/K53H, 4CS/K53M, 4CS/K53E, 4CS/K53Q, 4CS/K53A, 4CS/Q103E, 4CS/D110N, 4CS/N111Q, 4CS/E6A/K53A, 4CS/N14C/E31Q/S127C, 4CS/E31Q/K53A, 4CS/E31Q/D35N/K53A, 4CS/E31Q/N41Q/K53A, 4CS/E31Q/D35N/N41Q/K53A, 4CS/E31Q/D35N, 4CS/E31Q/N41Q, 4C S/E31Q/D35N/N41Q, 4C S/E31Q/D37N, 4CS/E31Q/D37N/K53A, 4CS/E31Q/M33C/S38C, 4C S/E31Q/S76C/L138C, 4CS/E31Q/S68I, 4CS/E31Q/S68F, 4CS/E31Q/S127W, 4CS/E31Q/S127Y, 4CS/E31Q/S127F, 4CS/S10C/E31Q/149C, 4C S/L15C/E31Q/R147C, 4C S/P28C/E31Q/L136C, 4CS/E31Q/S50C/P88C, 4CS/E31Q/163C/P88C, 4C S/E31Q/V62C/Q103C, 4CS/S10C/E31Q/N155C, 4CS/E31Q/S65C/P88C, 4CS/S7C/E31Q/S50C, 4CS/E31Q/D54C/A61C, 4C S/E31Q/A126C/K139C, 4CS/N14W/E31Q, 4CS/E31Q/D146Y, 4CS/E31Q/D146L, 4C S/E31Q/D146F, 4C S/E31Q/Q103L, 4CS/E31Q/Q103I, 4CS/E31Q/M150F, 4CS/Q18L/E31Q, 4CS/E31Q/S68Y, 4CS/E31Q/S38Q, 4C S/E31Q/S38R, 4CS/E31Q/S68D, 4CS/S7P/E31Q, 4CS/V11I/E31Q, 4CS/D23N/E31Q, 4CS/D23S/E31Q, 4CS/R27Q/E31Q, 4CS/L29V/E31Q, 4CS/E31Q/T34P, 4CS/E31Q/R39T, 4CS/E31Q/R39S, 4CS/E31Q/R44Q, 4CS/E31Q/I46V, 4CS/E31Q/S50Y, 4CS/E31Q/Q56L, 4CS/E31Q/Q56L/P57T, 4C S/E31Q/P57T, 4CS/E31Q/P57V, 4CS/E31Q/M60L, 4CS/E31Q/K67Q, 4CS/E31Q/E69K, 4CS/E31Q/I71M, 4CS/E31Q/E77K, 4CS/E31Q/I80T, 4CS/E31Q/I81V, 4CS/E31Q/I81L, 4C S/E31Q/N87S, 4CS/E31Q/D90E, 4CS/E31Q/K93D/T95E, 4CS/E31Q/K93N/T95E, 4CS/E31Q/T95E, 4CS/E31Q/K96G, 4CS/E31Q/S97N, 4CS/E31Q/N111D, 4CS/E31QN1113I, 4CS/E31Q/S119L, 4CS/E31Q/L144N, 4CS/E31Q/R147K, 4CS/E31Q/I149V, 4CS/E31Q/M150T, 4CS/E31Q/E156Q/D157N, 4CS/K53S, 4CS/K53G, 4CS/K53T, 4CS/K53I, 4CS/K53L, 4CS/K53N, 4CS/K53D, 4CS/M51K, 4CS/M51Q, 4CS/M51I, 4CS/S55N, 4CS/S55Q, 4CS/Q56L, 4CS/Q56I, 4CS/P57A, 4CS/P57E, 4CS/M60L, 4CS/M60I, 4CS/K8Y, 4CS/K8Q, 4CS/K8E, 4CS/H109W, 4CS/H109Y, 4CS/E31Q/S38E, 4CS/E31Q/S38L, 4CS/E31Q/S38I, 4C S/E31Q/S38V, 4C S/E31Q/S68N, 4CS/E31Q/S68E, 4CS/E31Q/S68Q, 4C S/E31Q/S76C, 4C S/E31Q/S127D, 4CS/E31Q/S127E, 4CS/D23N/E31Q/R27Q, 4CS/E31Q/Q56L/T95E, 4CS/E31Q/K96Q/S119L, 4CS/E31Q/E141K/I149V, 4CS/E31Q/E141Q/I149V, 4CS/S7P/E31Q/S50Y, 4C S/E31Q/I80T/I81L/delD193, 4C S/E31Q/P57A/S119L/delD193, 4CS/E31Q/P57A/180T/181L/S119L/delD193, 4CS/E31Q/P57A/K93D/T95E/S119L/delD193, 4C S/E31Q/I80T/S119L/delD193, 4C S/E31Q/I80T/I81L/K93D/T95E/delD193, 4CS/E31Q/P57A/180T/181L/K93D/T95E/S119L/delD193, 4CS/S7C/E31Q/S50C/delD193, 4CS/S7C/E31Q/S50C/P57A/delD193, 4C S/S7C/E31Q/S50C/S119L/delD193, 4CS/S7C/E31Q/S50C/I80T/delD193, 4CS/S7C/E31Q/S50C/I80T/S119L/delD193, 4CS/S7C/E31Q/S50C/P57A/I80T/S119L/delD193, 4CS/S10C/E31Q/N155C/delD193, 4CS/S10C/E31Q/P57A/N155C/delD193, 4CS/S10C/E31Q/S119L/N155C/delD193, 4CS/S10C/E31Q/I80T/N155C/delD193, 4C S/S10C/E31Q/I80T/S119L/N155C/delD193, 4CS/S10C/E31Q/P57A/I80T/S119L/N155C/delD193, 4C S/S10C/E31Q/I49C/delD193, 4CS/L15C/E31Q/R147C/delD193, 4CS/E31Q/T63C/P88C/delD193, 4CS/N14C/E31Q/S127C/delD193, 4CS/E31Q/S38R/S127W/delD193, 4CS/S10C/D35E/N155C, 4CS/S10C/S36D/N155C, 4CS/S10C/S36N/N155C, 4CS/S10C/K53V/N155C, 4CS/S10C/K53Y/N155C, 4CS/S10C/K53F/N155C, 4CS/S10C/M51R/N155C, 4CS/S10C/M51L/N155C, 4CS/S10C/M51H/N155C, 4CS/S10C/M51F/N155C, 4CS/S10C/M51Y/N155C, 4CS/S10C/S55D/N155C, 4CS/S10C/S55E/N155C, 4CS/S10C/S55T/N155C, 4CS/S10C/P57Q/N155C, 4CS/S10C/P57D/N155C, 4CS/S10C/P57Y/N155C, 4CS/S10C/P57N/N155C, 4CS/S10C/M60Y/N155C, 4CS/S10C/M60F/N155C, 4CS/S10C/D110Q/N155C, 4CS/S10C/D110R/N155C, 4CS/S10C/N111D/N155C, 4CS/S10C/N111S/N155C, 4CS/S10C/N111T/N155C, 4CS/S10C/N111E/N155C, 4CS/S10C/D132Q/N155C, 4CS/S10C/D132EN155C, 4CS/E6Q/S10C/K53D/N155C, 4CS/E6Q/S10C/M51K/K53D/N155C, 4CS/S10C/E31Q/D35N/N41Q/K53A/N155C, 4CS/S10C/E31Q/N41Q/K53A/N155C, 4CS/S10C/E31Q/K53A/N155C, 4CS/S10C/K53T/N155C, 4CS/S10C/P57A/N155C, 4CS/S10C/N155C, 4CS/S10C/S76G/N155C, 4CS/S10C/S76A/N155C, 4CS/S10C/M51K/K53D/N155C, 4CS/S10C/M51K/K53E/N155C, 4CS/E6Q/S10C/K53E/N155C, 4CS/E6Q/S10C/M51K/K53E/N155C, 4CS/E6Q/S10C/M51K/P57E/N155C, 4CS/S10C/M51K/P57E/N155C, 4CS/E6Q/S10C/P57E/N155C, 4CS/S10C/E31Q/K53T/N155C, 4CS/S10C/K53G/P57E/N155C, 4CS/S10C/K53T/P57E/N155C, 4CS/S10C/K53A/P57E/N155C, 4CS/S10C/P57E/N155C, 4CS/S10C/K53D/N155C, 4CS/S10C/E31Q/N41Q/N155C, 4CS/S10C/K53A/N155C, 4CS/S10C/K53G/N155C, 4CS/S10C/K53E/N155C, 4CS/S10C/K53S/N155C, 4CS/S10C/M51L/K53D/N155C, 4CS/S10C/K53D/D110R/N155C, 4CS/S10C/K53D/N111T/N155C, 4CS/S10C/K53D/S55T/N155C, 4CS/S10C/K53D/S55T/D110R/N155C, 4CS/S10C/M51L/K53D/S55T/D110R/N111T/N155C, 4CS/S10C/M51L/K53D/S55T/D110R/N155C, 4CS/S10C/K53D/S55T/D110R/N111T/N155C, 4CS/S10C/K53D/S55T/N111T/N155C, 4CS/S10C/E31Q/D35N/N155C, 4CS/S10C/N41Q/N155C, 4CS/S10C/D35N/N155C, 4CS/S10C/D37N/N155C, 4CS/S10C/E31Q/D37N/N155C, 4CS/S10C/D35N/D37N/N155C, 4CS/E6Q/S10C/M51L/K53D/S55T/D110R/N111T/N155C, 4CS/S10C/K53D/H109Y/N155C, 4CS/S10C/D37N/K53D/N155C, 4CS/S10C/D35N/K53D/N155C, 4CS/K8E/S10C/K53D/N155C, 4CS/S10C/E31Q/K53D/N155C, 4CS/S10C/N41Q/K53D/N155C, 4CS/S10C/K53D/P57V/N155C, 4CS/S10C/K53D/P57T/N155C, 4CS/E6Q/S10C/K53D/N111T/N155C, E6A/K53A, D35N/K53A, N41Q/K53A, D35N/N41Q/K53A, D35N/N41Q, D37N/K53A, E6Q/K53D, E6Q/M51K/K53D, M51K/K53D, M51K/K53E, E6Q/K53E, E6Q/M51K/K53E, E6Q/M51K/P57E, M51K/P57E, E6Q/P57E, K53G/P57E, K53T/P57E, K53A/P57E, M51L/K53D, K53D/D110R, K53D/N111T, K53D/S55T, K53D/S55T/D110R, M51L/K53D/S55T/D110R/N111T, M51L/K53D/S55T/D110R, K53D/S55T/D110R/N111T, K53D/S55T/N111T, D35N/D37N, E6Q/M51L/K53D/S55T/D110R/N111T, K53D/H109Y, D37N/K53D, D35N/K53D, K8E/K53D, N41Q/K53D, K53D/P57V, K53D/P57T, E6Q/K53D/N111T, Q56L/P57T, K93D/T95E, K93N/T95E, E156Q/D157N, D23N/R27Q, Q56L/T95E, K96Q/S119L, E141K/I149V, E141Q/I149V, S7P/S50Y, I80T/I81L, P57A/S119L, P57A/I80T/I81L/S119L, P57A/K93D/T95E/S119L, I80T/S119L, I80T/I81L/K93D/T95E, P57A/I80T/I81L/K93D/T95E/S119L, P57A/I80T/S119L, N14C/S127C, M33C/S38C, S76C/L138C, S10C/I49C, L15C/R147C, P28C/L136C, S50C/P88C, T63C/P88C, V62C/Q103C, S10C/N155C, S65C/P88C, S7C/S50C, D54C/A61C, A126C/K139C, C38R/C127W, E31Q/K53A, E31Q/D35N/K53A, E31Q/N41Q/K53A, E31Q/D35N/N41Q/K53A, E31Q/D35N, E31Q/N41Q, E31Q/D35N/N41Q, E31Q/D37N, E31Q/D37N/K53A, S10C/E31Q/I49C, L15C/E31Q/R147C, P28C/E31Q/L136C, E31Q/S50C/P88C, E31Q/T63C/P88C, E31Q/V62C/Q103C, S10C/E31Q/N155C, E31Q/S65C/P88C, S7C/E31Q/S50C, E31Q/D54C/A61C, E31Q/A126C/K139C, N14W/E31Q, E31Q/D146Y, E31Q/D146L, E31Q/D146F, E31Q/Q103L, E31Q/Q103I, E31Q/M150F, Ql8L/E31Q, S7P/E31Q, V11I/E31Q, D23N/E31Q, D23 S/E31Q, R27Q/E31Q, L29V/E31Q, E31Q/T34P, E31Q/R39T, E31Q/R39S, E31Q/R44Q, E31Q/I46V, E31Q/S50Y, E31Q/Q56L, E31Q/Q56L/P57T, E31Q/P57T, E31Q/P57V, E31Q/M60L, E31Q/K67Q, E31Q/E69K, E31Q/I71M, E31Q/E77K, E31Q/I80T, E31Q/I81V, E31Q/I81L, E31Q/N87S, E31Q/D90E, E31Q/K93D/T95E, E31Q/K93N/T95E, E31Q/T95E, E31Q/K96G, E31Q/S97N, E31Q/N111D, E31Q/M113I, E31Q/S119L, E31Q/L144N, E31Q/R147K, E31Q/I149V, E31Q/M150T, E31Q/E156Q/D157N, D23N/E31Q/R27Q, E31Q/Q56L/T95E, E31Q/K96Q/S119L, E31Q/E141K/I149V, E31Q/E141Q/I149V, S7P/E31Q/S50Y, E31Q/I80T/I81L/delD193, E31Q/P57A/S119L/delD193, E31Q/P57A/I80T/I8 1L/S 11 9L/delD193, E31Q/P57A/K93D/T95E/S119L/delD193, E31Q/I80T/S119L/delD193, E31Q/I80T/I81L/K93D/T95E/delD193, E31Q/P57A/180T/181L/K93D/T95E/S119L/delD193, S7C/E31Q/S50C/delD193, S7C/E31Q/S50C/P57A/delD193, S7C/E31Q/S50C/S119L/delD193, S7C/E31Q/S50C/I80T/delD193, S7C/E31Q/S50C/I80T/S119L/delD193, S7C/E31Q/S50C/P57A/I80T/S119L/delD193, S10C/E31Q/N155C/delD193, S10C/E31Q/P57A/N155C/delD193, S10C/E31Q/S119L/N155C/delD193, S10C/E31Q/I80T/N155C/delD193, S10C/E31Q/I80T/S119L/N155C/delD193, S10C/E31Q/P57A/I80T/S119L/N155C/delD193, S10C/E31Q/I49C/delD193, L15C/E31Q/R147C/delD193, E31Q/T63C/P88C/delD193, S10C/D35E/N155C, S10C/S36D/N155C, S10C/S36N/N155C, S10C/K53V/N155C, S10C/K53Y/N155C, S10C/K53F/N155C, S10C/M51R/N155C, S10C/M51L/N155C, S10C/M51H/N155C, S10C/M51F/N155C, S10C/M51Y/N155C, S10C/S55D/N155C, S10C/S55E/N155C, S10C/S55T/N155C, S10C/P57Q/N155C, S10C/P57D/N155C, S10C/P57Y/N155C, S10C/P57N/N155C, S10C/M60Y/N155C, S10C/M60F/N155C, S10C/D110Q/N155C, S10C/D110R/N155C, S10C/N111D/N155C, S10C/N111S/N155C, S10C/N111T/N155C, S10C/N111E/N155C, S10C/D132Q/N155C, S10C/D132E/N155C, E6Q/S10C/K53D/N155C, E6Q/S10C/M51K/K53D/N155C, S10C/E31Q/D35N/N41Q/K53A/N155C, S10C/E31Q/N41Q/K53A/N155C, S10C/E31Q/K53A/N155C, S10C/K53T/N155C, S10C/P57A/N155C, S10C/M51K/K53D/N155C, S10C/M51K/K53E/N155C, E6Q/S10C/K53E/N155C, E6Q/S10C/M51K/K53E/N155C, E6Q/S10C/M51K/P57E/N155C, S10C/M51K/P57E/N155C, E6Q/S10C/P57E/N155C, S10C/E31Q/K53T/N155C, S10C/K53G/P57E/N155C, S10C/K53T/P57E/N155C, S10C/K53A/P57E/N155C, S10C/P57E/N155C, S10C/K53D/N155C, S10C/E31Q/N41Q/N155C, S10C/K53A/N155C, S10C/K53G/N155C, S10C/K53E/N155C, S10C/K53S/N155C, S10C/M51L/K53D/N155C, S10C/K53D/D110R/N155C, S10C/K53D/N111T/N155C, S10C/K53D/S55T/N155C, S10C/K53D/S55T/D110R/N155C, S10C/M51L/K53D/S55T/D110R/N111T/N155C, S10C/M51L/K53D/S55T/D110R/N155C, S10C/K53D/S55T/D110R/N111T/N155C, S10C/K53D/S55T/N111T/N155C, S10C/E31Q/D35N/N155C, S10C/N41Q/N155C, S10C/D35N/N155C, S10C/D37N/N155C, S10C/E31Q/D37N/N155C, S10C/D35N/D37N/N155C, E6Q/S10C/M51L/K53D/S55T/D110R/N111T/N155C, S10C/K53D/H109Y/N155C, S10C/D37N/K53D/N155C, S10C/D35N/K53D/N155C, K8E/S10C/K53D/N155C, S10C/E31Q/K53D/N155C, S10C/N41Q/K53D/N155C, S10C/K53D/P57V/N155C, S10C/K53D/P57T/N155C, or E6Q/S10C/K53D/N111T/N155C.

[0017] In some embodiments, the first and second monomer each comprises an amino acid sequence selected from the group consisting of: SEQ ID NOS:239-292 and 960-1039 (XENP30792, XENP31296, XENP31812-XENP31814, XENP34106-XENP34114, XENP34281, XENP37825, XENP37826, XENP38869, XENP39138-XENP39142, XENP39149-XENP39152, XENP39672, XENP39804, XENP39805, XENP40024, XENP40025, XENP40685, XENP40962-XENP40968, XENP41756-41770, XENP41974-41975, XENP42006-XENP42012, and XENP42141-42148 in FIGS. 21A-21M).

[0018] In some aspects, provided herein is a monovalent Fc fusion protein comprising: (a) a first monomer comprising from N-terminus to C-terminus: a variant IL-18 protein and a first Fc domain, wherein the variant human IL-18 protein comprises amino acid substitutions 4CS/E6Q/S10C/K53D/N111T/N155C, and wherein the variant IL-18 protein is covalently attached to the N-terminus of the first Fc domain; and (b) a second monomer comprising a second Fc domain.

[0019] Provided herein is one or more nucleic acids encoding any one of the monovalent Fc fusion proteins described. Provided herein is an expression vector comprising any of the one or more nucleic acids described herein. Provided herein is a host cell comprising any of the one of more nucleic acids described or any of the expression vectors described herein. In some embodiments, provided is a method of making a monovalent Fc fusion protein comprising culturing any of the host cells described and recovering the monovalent Fc fusion protein from the cell culture.

[0020] In some aspect, provided herein is a Fab-Fc fusion protein comprising: (a) a first monomer comprising from N-terminus to C-terminus: a variable heavy (VH) chain and a first Fc domain; (b) a second monomer comprising from N-terminus to C-terminus: a wildtype or variant IL-18 protein and a second Fc domain; and (c) a third monomer comprising a variable light (VL) chain, wherein the VH and VL form an antigen binding fragment (Fab).

[0021] In some embodiments of the Fab-Fc fusion protein, the second Fc domain further comprises a set of amino acid substitutions Q295E/N384D/Q418E/N421D, according to EU numbering. In some embodiments, the first and/or second Fc domains further comprise a modification of K447del, according to EU numbering. In some embodiments, the first and/or second Fc domains further comprise a set of amino acid substitutions selected from the group consisting of C219S, C220S, S228P, G236R/L328R, E233P/L234V/L235A/G236del/S239K, E233P/L234V/L235A/G236del/S239K/A327G, E233P/L234V/L235A/G236del/S267K/A327G, E233P/L234V/L235A/G236del, E233P/L234V/L235A/G236del/S267K, and C220S/E233P/L234V/L235A/G236del/S267K, according to EU numbering. In some embodiments, the first and second Fc domains each further comprises modifications C220S/E233P/L234V/L235A/G236del/S267K, according to EU numbering. In some embodiments, the first Fc domain and the second Fc domain have a set of amino acid substitutions selected from the group consisting of: (i) S267K/L368D/K370S: S267K/S364K/E357Q; (ii) S364K/E357Q: L368D/K370S; (iii) L368D/K370S: S364K; (iv) L368E/K370S: S364K; (v) T411E/K360E/Q362E: D401K; (vi) L368D/K370S: S364K/E357Q, and (vii) K370S: S364K/E357Q, according to EU numbering. In some embodiments, the first and second Fc domains further comprise amino acid substitutions M428L/N434S, according to EU numbering.

[0022] In some embodiments of the Fab-Fc fusion protein, the wildtype or variant IL-18 protein is covalently attached to the N-terminus of the first Fc domain. In some embodiments, the wildtype or variant IL-18 protein is covalently attached to a domain linker which is covalently attached to the N-terminus of the first Fc domain. In some embodiments, the domain linker is selected from any one of the domain linkers in FIG. 8.

[0023] In some embodiments, the wildtype IL18 protein has an amino acid sequence selected from the group consisting of SEQ ID NO:1 (human precursor IL18) and SEQ ID NO:2 (human mature IL18).

[0024] In some embodiments, the variant IL18 protein has at least 90% sequence identity to an amino acid sequence selected from the group consisting of SEQ ID NO:1 (human precursor IL18) and SEQ ID NO:2 (human mature IL18).

[0025] In some embodiments, the variant IL18 protein comprising a modification at one or more amino acid positions selected from the group consisting of Y1, E6, S7, K8, S10, V11, N14, L15, D17, Q18, D23, R27, P28, L29, E31, M33, T34, D35, S36, D37, C38, R39, D40, N41, R44, I46, 149, S50, M51, K53, D54, S55, Q56, P57, M60, A61, V62, T63, S65, K67, C68, E69, I71, C76, E77, I80, I81, N87, P88, D90, K93, T95, K96, S97, Q103, H109, D110, N111, M113, S119, A126, C127, D132, L136, L138, K139, E141, L144, D146, R147, I149, M150, N155, E156, and D157, as compared to wildtype human IL18.

[0026] In some embodiments, the variant IL18 protein comprising one or more amino acid substitutions selected from the group consisting of Y1F, Y1H, E6A, E6Q, S7C, S7P, K8E, K8Q, K8Y, S10C, V11I, N14C, N14W, L15C, D17N, Q18L, D23N, D23S, R27Q, P28C, L29V, E31Q, M33C, T34P, D35N, D35E, S36D, S36N, D37N, C38S, C38Q, C38R, C38E, C38L, C381, C38V, C38K, C38D, R39S, R39T, D40N, N41Q, R44Q, I46V, I49C, S50C, S50Y, M51I, M51K, M51Q, M51R, M51L, M51H, M51F, M51Y, K53A, K53D, K53E, K53G, K53H, K531, K53L, K53M, K53N, K53Q, K53R, K53S, K531, K53V, K53Y, K53F, D54C, S55N, S55Q, S55D, S55E, S55T,Q56I, Q56L, P57A, P57E, P571, P57V, P57Q, P57D, P57Y, P57N, M60I, M60L, M60K, M60Y, M60F, A61C, V62C, T63C, S65C, K67Q, C68S, C68I, C68F, C68Y, C68D, C68N, C68E, C68Q, C68K, E69K, I71M, C76S, C76E, C76K, E77K, 180T, I81L, I81V, N87S, P88C, D90E, K93D, K93N, T95E, K96G, K96Q, S97N, Q103C, Q103E, Q103I, Q103L, H109W, H109Y, D110N, D110Q, D110R, N111D, N111Q, N111S, N111T, N111E, M113I, S119L, A126C, C127S, C127W, C127Y, C127F, C127D, C127E, C127K, D132Q, D132E, L136C, L138C, K139C, E141K, E141Q, L144N, D146F, D146L, D146Y, R147C, R147K, I149V, M150F, M150T, N155C, E156Q, D157A, D157S, D157N, and D157del, as compared to wildtype human IL18. In some embodiments, the amino acid substitution can include 4CS, 4CS/D193S, 4CS/D193A, 4CS/delD193, 4CS/S38E, 4CS/S68E, 4CS/S76E, 4CS/S127E, 4CS/S38K, 4CS/S68K, 4CS/S76K, 4CS/S127K, 4CS/S38D, 4CS/Y1F, 4CS/Y1H, 4CS/E6A, 4CS/E6Q, 4CS/D17N, 4CS/E31Q, 4CS/D35N, 4CS/D37N, 4CS/D40N, 4CS/N41Q, 4CS/K53R, 4CS/K53H, 4CS/K53M, 4CS/K53E, 4CS/K53Q, 4CS/K53A, 4CS/Q103E, 4CS/D110N, 4CS/N111Q, 4CS/E6A/K53A, 4CS/N14C/E31Q/S127C, 4CS/E31Q/K53A, 4CS/E31Q/D35N/K53A, 4CS/E31Q/N41Q/K53A, 4CS/E31Q/D35N/N41Q/K53A, 4CS/E31Q/D35N, 4CS/E31Q/N41Q, 4C S/E31Q/D35N/N41Q, 4C S/E31Q/D37N, 4CS/E31Q/D37N/K53A, 4CS/E31Q/M33C/S38C, 4C S/E31Q/S76C/L138C, 4CS/E31Q/S68I, 4CS/E31Q/S68F, 4CS/E31Q/S127W, 4CS/E31Q/S127Y, 4CS/E31Q/S127F, 4CS/S10C/E31Q/149C, 4C S/L15C/E31Q/R147C, 4C S/P28C/E31Q/L136C, 4CS/E31Q/S50C/P88C, 4CS/E31Q/163C/P88C, 4C S/E31Q/V62C/Q103C, 4CS/S10C/E31Q/N155C, 4CS/E31Q/S65C/P88C, 4CS/S7C/E31Q/S50C, 4CS/E31Q/D54C/A61C, 4C S/E31Q/A126C/K139C, 4CS/N14W/E31Q, 4CS/E31Q/D146Y, 4CS/E31Q/D146L, 4C S/E31Q/D146F, 4C S/E31Q/Q103L, 4CS/E31Q/Q103I, 4C S/E31Q/M150F, 4CS/Q18L/E31Q, 4CS/E31Q/S68Y, 4CS/E31Q/S38Q, 4C S/E31Q/S38R, 4CS/E31Q/S68D, 4CS/S7P/E31Q, 4CS/V11I/E31Q, 4CS/D23N/E31Q, 4CS/D23S/E31Q, 4CS/R27Q/E31Q, 4CS/L29V/E31Q, 4CS/E31Q/T34P, 4CS/E31Q/R39T, 4CS/E31Q/R39S, 4CS/E31Q/R44Q, 4CS/E31Q/I46V, 4CS/E31Q/S50Y, 4CS/E31Q/Q56L, 4CS/E31Q/Q56L/P57T, 4C S/E31Q/P57T, 4CS/E31Q/P57V, 4CS/E31Q/M60L, 4CS/E31Q/K67Q, 4CS/E31Q/E69K, 4CS/E31Q/I71M, 4CS/E31Q/E77K, 4CS/E31Q/I80T, 4CS/E31Q/I81V, 4CS/E31Q/I81L, 4C S/E31Q/N87S, 4CS/E31Q/D90E, 4CS/E31Q/K93D/T95E, 4CS/E31Q/K93N/T95E, 4CS/E31Q/T95E, 4CS/E31Q/K96G, 4CS/E31Q/S97N, 4CS/E31Q/N111D, 4CS/E31QN1113I, 4CS/E31Q/S119L, 4CS/E31Q/L144N, 4CS/E31Q/R147K, 4CS/E31Q/I149V, 4CS/E31Q/M150T, 4CS/E31Q/E156Q/D157N, 4CS/K53S, 4CS/K53G, 4CS/K53T, 4CS/K53I, 4CS/K53L, 4CS/K53N, 4CS/K53D, 4CS/M51K, 4CS/M51Q, 4CS/M51I, 4CS/S55N, 4CS/S55Q, 4CS/Q56L, 4CS/Q56I, 4CS/P57A, 4CS/P57E, 4CS/M60L, 4CS/M601, 4CS/K8Y, 4CS/K8Q, 4CS/K8E, 4CS/H109W, 4CS/H109Y, 4CS/E31Q/S38E, 4CS/E31Q/S38L, 4CS/E31Q/S38I, 4C S/E31Q/S38V, 4C S/E31Q/S68N, 4CS/E31Q/S68E, 4CS/E31Q/S68Q, 4C S/E31Q/S76C, 4C S/E31Q/S127D, 4CS/E31Q/S127E, 4CS/D23N/E31Q/R27Q, 4CS/E31Q/Q56L/T95E, 4CS/E31Q/K96Q/S119L, 4CS/E31Q/E141K/I149V, 4CS/E31Q/E141Q/I149V, 4CS/S7P/E31Q/S50Y, 4C S/E31Q/I80T/I81L/delD193, 4C S/E31Q/P57A/S119L/delD193, 4CS/E31Q/P57A/180T/181L/S119L/delD193, 4CS/E31Q/P57A/K93D/T95E/S119L/delD193, 4C S/E31Q/I80T/S119L/delD193, 4C S/E31Q/I80T/I81L/K93D/T95E/delD193, 4CS/E31Q/P57A/180T/181L/K93D/T95E/S119L/delD193, 4CS/S7C/E31Q/S50C/delD193, 4CS/S7C/E31Q/S50C/P57A/delD193, 4C S/S7C/E31Q/S50C/S119L/delD193, 4CS/S7C/E31Q/S50C/I80T/delD193, 4CS/S7C/E31Q/S50C/I80T/S119L/delD193, 4CS/S7C/E31Q/S50C/P57A/I80T/S119L/delD193, 4CS/S10C/E31Q/N155C/delD193, 4CS/S10C/E31Q/P57A/N155C/delD193, 4CS/S10C/E31Q/S119L/N155C/delD193, 4CS/S10C/E31Q/I80T/N155C/delD193, 4C S/S10C/E31Q/I80T/S119L/N155C/delD193, 4CS/S10C/E31Q/P57A/I80T/S119L/N155C/delD193, 4C S/S10C/E31Q/I49C/delD193, 4CS/L15C/E31Q/R147C/delD193, 4CS/E31Q/T63C/P88C/delD193, 4CS/N14C/E31Q/S127C/delD193, 4CS/E31Q/S38R/S127W/delD193, 4CS/S10C/D35E/N155C, 4CS/S10C/S36D/N155C, 4CS/S10C/S36N/N155C, 4CS/S10C/K53V/N155C, 4CS/S10C/K53Y/N155C, 4CS/S10C/K53F/N155C, 4CS/S10C/M51R/N155C, 4CS/S10C/M51L/N155C, 4CS/S10C/M51H/N155C, 4CS/S10C/M51F/N155C, 4CS/S10C/M51Y/N155C, 4CS/S10C/S55D/N155C, 4CS/S10C/S55E/N155C, 4CS/S10C/S55T/N155C, 4CS/S10C/P57Q/N155C, 4CS/S10C/P57D/N155C, 4CS/S10C/P57Y/N155C, 4CS/S10C/P57N/N155C, 4CS/S10C/M60Y/N155C, 4CS/S10C/M60F/N155C, 4CS/S10C/D110Q/N155C, 4CS/S10C/D110R/N155C, 4CS/S10C/N111D/N155C, 4CS/S10C/N111S/N155C, 4CS/S10C/N111T/N155C, 4CS/S10C/N111E/N155C, 4CS/S10C/D132Q/N155C, 4CS/S10C/D132E/N155C, 4CS/E6Q/S10C/K53D/N155C, 4CS/E6Q/S10C/M51K/K53D/N155C, 4CS/S10C/E31Q/D35N/N41Q/K53A/N155C, 4CS/S10C/E31Q/N41Q/K53A/N155C, 4CS/S10C/E31Q/K53A/N155C, 4CS/S10C/K53T/N155C, 4CS/S10C/P57A/N155C, 4CS/S10C/N155C, 4CS/S10C/S76G/N155C, 4CS/S10C/S76A/N155C, 4CS/S10C/M51K/K53D/N155C, 4CS/S10C/M51K/K53E/N155C, 4CS/E6Q/S10C/K53E/N155C, 4CS/E6Q/S10C/M51K/K53E/N155C, 4CS/E6Q/S10C/M51K/P57E/N155C, 4CS/S10C/M51K/P57E/N155C, 4CS/E6Q/S10C/P57E/N155C, 4CS/S10C/E31Q/K53T/N155C, 4CS/S10C/K53G/P57E/N155C, 4CS/S10C/K53T/P57E/N155C, 4CS/S10C/K53A/P57E/N155C, 4CS/S10C/P57E/N155C, 4CS/S10C/K53D/N155C, 4CS/S10C/E31Q/N41Q/N155C, 4CS/S10C/K53A/N155C, 4CS/S10C/K53G/N155C, 4CS/S10C/K53E/N155C, 4CS/S10C/K53S/N155C, 4CS/S10C/M51L/K53D/N155C, 4CS/S10C/K53D/D110R/N155C, 4CS/S10C/K53D/N111T/N155C, 4CS/S10C/K53D/S55T/N155C, 4CS/S10C/K53D/S55T/D110R/N155C, 4CS/S10C/M51L/K53D/S55T/D110R/N111T/N155C, 4CS/S10C/M51L/K53D/S55T/D110R/N155C, 4CS/S10C/K53D/S55T/D110R/N111T/N155C, 4CS/S10C/K53D/S55T/N111T/N155C, 4CS/S10C/E31Q/D35N/N155C, 4CS/S10C/N41Q/N155C, 4CS/S10C/D35N/N155C, 4CS/S10C/D37N/N155C, 4CS/S10C/E31Q/D37N/N155C, 4CS/S10C/D35N/D37N/N155C, 4CS/E6Q/S10C/M51L/K53D/S55T/D110R/N111T/N155C, 4CS/S10C/K53D/H109Y/N155C, 4CS/S10C/D37N/K53D/N155C, 4CS/S10C/D35N/K53D/N155C, 4CS/K8E/S10C/K53D/N155C, 4CS/S10C/E31Q/K53D/N155C, 4CS/S10C/N41Q/K53D/N155C, 4CS/S10C/K53D/P57V/N155C, 4CS/S10C/K53D/P57T/N155C, 4CS/E6Q/S10C/K53D/N111T/N155C, E6A/K53A, D35N/K53A, N41Q/K53A, D35N/N41Q/K53A, D35N/N41Q, D37N/K53A, E6Q/K53D, E6Q/M51K/K53D, M51K/K53D, M51K/K53E, E6Q/K53E, E6Q/M51K/K53E, E6Q/M51K/P57E, M51K/P57E, E6Q/P57E, K53G/P57E, K53T/P57E, K53A/P57E, M51L/K53D, K53D/D110R, K53D/N111T, K53D/S55T, K53D/S55T/D110R, M51L/K53D/S55T/D110R/N111T, M51L/K53D/S55T/D110R, K53D/S55T/D110R/N111T, K53D/S55T/N111T, D35N/D37N, E6Q/M51L/K53D/S55T/D110R/N111T, K53D/H109Y, D37N/K53D, D35N/K53D, K8E/K53D, N41Q/K53D, K53D/P57V, K53D/P57T, E6Q/K53D/N111T, Q56L/P57T, K93D/T95E, K93N/T95E, E156Q/D157N, D23N/R27Q, Q56L/T95E, K96Q/S119L, E141K/I149V, E141Q/I149V, S7P/S50Y, I80T/I81L, P57A/S119L, P57A/I80T/I81L/S119L, P57A/K93D/T95E/S119L, I80T/S119L, I80T/I81L/K93D/T95E, P57A/I80T/I81L/K93D/T95E/S119L, P57A/I80T/S119L, N14C/S127C, M33C/S38C, S76C/L138C, S10C/I49C, L15C/R147C, P28C/L136C, S50C/P88C, T63C/P88C, V62C/Q103C, S10C/N155C, S65C/P88C, S7C/S50C, D54C/A61C, A126C/K139C, C38R/C127W, E31Q/K53A, E31Q/D35N/K53A, E31Q/N41Q/K53A, E31Q/D35N/N41Q/K53A, E31Q/D35N, E31Q/N41Q, E31Q/D35N/N41Q, E31Q/D37N, E31Q/D37N/K53A, S10C/E31Q/I49C, L15C/E31Q/R147C, P28C/E31Q/L136C, E31Q/S50C/P88C, E31Q/T63C/P88C, E31Q/V62C/Q103C, S10C/E31Q/N155C, E31Q/S65C/P88C, S7C/E31Q/S50C, E31Q/D54C/A61C, E31Q/A126C/K139C, N14W/E31Q, E31Q/D146Y, E31Q/D146L, E31Q/D146F, E31Q/Q103L, E31Q/Q103I, E31Q/M150F, Ql8L/E31Q, S7P/E31Q, V11I/E31Q, D23N/E31Q, D23 S/E31Q, R27Q/E31Q, L29V/E31Q, E31Q/T34P, E31Q/R39T, E31Q/R39S, E31Q/R44Q, E31Q/I46V, E31Q/S50Y, E31Q/Q56L, E31Q/Q56L/P57T, E31Q/P57T, E31Q/P57V, E31Q/M60L, E31Q/K67Q, E31Q/E69K, E31Q/I71M, E31Q/E77K, E31Q/I80T, E31Q/I81V, E31Q/I81L, E31Q/N87S, E31Q/D90E, E31Q/K93D/T95E, E31Q/K93N/T95E, E31Q/T95E, E31Q/K96G, E31Q/S97N, E31Q/N111D, E31Q/M113I, E31Q/S119L, E31Q/L144N, E31Q/R147K, E31Q/I149V, E31Q/M150T, E31Q/E156Q/D157N, D23N/E31Q/R27Q, E31Q/Q56L/T95E, E31Q/K96Q/S119L, E31Q/E141K/I149V, E31Q/E141Q/I149V, S7P/E31Q/S50Y, E31Q/I80T/I81L/delD193, E31Q/P57A/S119L/delD193, E31Q/P57A/I80T/I8 1L/S 11 9L/delD193, E31Q/P57A/K93D/T95E/S119L/delD193, E31Q/I80T/S119L/delD193, E31Q/I80T/I81L/K93D/T95E/delD193, E31Q/P57A/I80T/I81L/K93D/T95E/S119L/delD193, S7C/E31Q/S50C/delD193, S7C/E31Q/S50C/P57A/delD193, S7C/E31Q/S50C/S119L/delD193, S7C/E31Q/S50C/I80T/delD193, S7C/E31Q/S50C/I80T/S119L/delD193, S7C/E31Q/S50C/P57A/I80T/S119L/delD193, S10C/E31Q/N155C/delD193, S10C/E31Q/P57A/N155C/delD193, S10C/E31Q/S119L/N155C/delD193, S10C/E31Q/I80T/N155C/delD193, S10C/E31Q/I80T/S119L/N155C/delD193, S10C/E31Q/P57A/I80T/S119L/N155C/delD193, S10C/E31Q/I49C/delD193, L15C/E31Q/R147C/delD193, E31Q/T63C/P88C/delD193, S10C/D35E/N155C, S10C/S36D/N155C, S10C/S36N/N155C, S10C/K53V/N155C, S10C/K53Y/N155C, S10C/K53F/N155C, S10C/M51R/N155C, S10C/M51L/N155C, S10C/M51H/N155C, S10C/M51F/N155C, S10C/M51Y/N155C, S10C/S55D/N155C, S10C/S55E/N155C, S10C/S55T/N155C, S10C/P57Q/N155C, S10C/P57D/N155C, S10C/P57Y/N155C, S10C/P57N/N155C, S10C/M60Y/N155C, S10C/M60F/N155C, S10C/D110Q/N155C, S10C/D110R/N155C, S10C/N111D/N155C, S10C/N111S/N155C, S10C/N111T/N155C, S10C/N111E/N155C, S10C/D132Q/N155C, S10C/D132E/N155C, E6Q/S10C/K53D/N155C, E6Q/S10C/M51K/K53D/N155C, S10C/E31Q/D35N/N41Q/K53A/N155C, S10C/E31Q/N41Q/K53A/N155C, S10C/E31Q/K53A/N155C, S10C/K53T/N155C, S10C/P57A/N155C, S10C/M51K/K53D/N155C, S10C/M51K/K53E/N155C, E6Q/S10C/K53E/N155C, E6Q/S10C/M51K/K53E/N155C, E6Q/S10C/M51K/P57E/N155C, S10C/M51K/P57E/N155C, E6Q/S10C/P57E/N155C, S10C/E31Q/K53T/N155C, S10C/K53G/P57E/N155C, S10C/K53T/P57E/N155C, S10C/K53A/P57E/N155C, S10C/P57E/N155C, S10C/K53D/N155C, S10C/E31Q/N41Q/N155C, S10C/K53A/N155C, S10C/K53G/N155C, S10C/K53E/N155C, S10C/K53S/N155C, S10C/M51L/K53D/N155C, S10C/K53D/D110R/N155C, S10C/K53D/N111T/N155C, S10C/K53D/S55T/N155C, S10C/K53D/S55T/D110R/N155C, S10C/M51L/K53D/S55T/D110R/N111T/N155C, S10C/M51L/K53D/S55T/D110R/N155C, S10C/K53D/S55T/D110R/N111T/N155C, S10C/K53D/S55T/N111T/N155C, S10C/E31Q/D35N/N155C, S10C/N41Q/N155C, S10C/D35N/N155C, S10C/D37N/N155C, S10C/E31Q/D37N/N155C, S10C/D35N/D37N/N155C, E6Q/S10C/M51L/K53D/S55T/D110R/N111T/N155C, S10C/K53D/H109Y/N155C, S10C/D37N/K53D/N155C, S10C/D35N/K53D/N155C, K8E/S10C/K53D/N155C, S10C/E31Q/K53D/N155C, S10C/N41Q/K53D/N155C, S10C/K53D/P57V/N155C, S10C/K53D/P57T/N155C, or E6Q/S10C/K53D/N111T/N155C.

[0027] In some embodiments, the first second and third monomers each comprises an amino acid sequence selected from the group consisting of: SEQ ID NOS:294-774 and 1040-1264 (XENP38850-XENP38868, XENP38952-XENP38954, XENP38868, XENP38956, XENP38957, XENP39601-XENP39604, XENP40027, XENP40046-XENP40054, XENP40175-XENP40244, XENP40246-XENP40269, XENP40617-XENP40632, XENP40657-XENP40663, XENP40686, XENP40934-XENP40961, XENP41076-XENP41096, XENP41353, XENP41416-XENP41431, XENP41440, and XENP41513-XENP41520 in FIGS. 22A-22CZ).

[0028] In some aspects, provided herein is a Fab-Fc fusion protein comprising: (a) a first monomer comprising from N-terminus to C-terminus: a variable heavy (VH) chain and a first Fc domain; (b) a second monomer comprising from N-terminus to C-terminus: a variant IL-18 protein and a second Fc domain, wherein the variant human IL-18 protein comprises amino acid substitutions 4CS/E6Q/S10C/K53D/N111T/N155C; and (c) a third monomer comprising a variable light (VL) chain, wherein the VH and VL form an antigen binding fragment (Fab), wherein the first Fc domain comprises amino acid substitutions C220S/PVA /S267K/L368D/K370S/M428L/N434S, and the second Fc domain comprises amino acid substitutions PVA /S267K/S364K/E357Q/M428L/N434S, according to EU numbering.

[0029] Provided herein is one or more nucleic acids encoding any one of the Fab-Fc fusion proteins described herein. Provided herein is an expression vector comprising any of the one or more nucleic acids described herein. Provided herein is a host cell comprising any of the one or more nucleic acids described herein or any of the expression vectors described herein. In some aspects, provided is a method of making a Fab-Fc fusion protein comprising culturing any of the host cells described herein and recovering the Fab-Fc fusion protein from the cell culture.

[0030] In some aspect, provided is a method of reducing a tumor comprising contacting the tumor with a composition comprising a composition comprising any one of the variant human IL-18 proteins described, any one of the monovalent Fc fusion proteins described, and any one of the Fab-Fc fusion proteins described. In some embodiments, the subject is a human subject.

[0031] In some aspect, provided is a method of reducing a tumor in a subject in need thereof comprising administering to the subject a composition comprising any one of the variant human IL-18 proteins described, any one of the monovalent Fc fusion proteins described, and any one of the Fab-Fc fusion proteins described. In some embodiments, the subject is a human subject.

[0032] In some aspect, provided is a method of treating a subject having a cancer, comprising administering to the subject a composition any one of the variant human IL-18 proteins described, any one of the monovalent Fc fusion proteins described, and any one of the Fab-Fc fusion proteins described. In some embodiments, the subject is a human subject.

### BRIEF DESCRIPTION OF THE DRAWINGS

[0033] FIGS. 1A-1B depict the sequences for human IL18, its receptors, and IL18 binding protein.

[0034] FIGS. 2A-2B depict the sequences for mouse IL18 and its receptors to facilitate investigation of IL18 fusion proteins of the invention in preclinical studies.

[0035] FIGS. 3A-3B depict the sequences for cynomolgus IL18 and its receptors to facilitate investigation of IL18 fusion proteins of the invention in preclinical studies.

[0036] FIGS. 4A-4E depict useful pairs of Fc heterodimerization variant sets (including skew and pI variants). Variants without a corresponding “monomer 2” are pI variants which can be used alone on either monomer

[0037] FIG. 5 depict a list of isosteric variant antibody constant regions and their respective substitutions. pI_(−) indicates lower pI variants, while pI (+) indicates higher pI variants. These can be optionally and independently combined with other heterodimerization variants of the inventions (and other variant types as well, as outlined herein.)

[0038] FIG. 6 depict useful ablation variants that ablate FcγR binding (sometimes referred to as “knock outs” or “KO” variants). Generally, ablation variants are found on both monomers, although in some cases they may be on only one monomer.

[0039] FIG. 7 shows particularly useful embodiments of “non-cytokine”/“non-Fv” components of the IL18 fusions of the invention.

[0040] FIG. 8 depicts a number of exemplary domain linkers. In some embodiments, these linkers find use linking an IL18 monomer to an Fc chain. In other embodiments, these linkers find use linking a variable heavy region to an Fc chain (optionally via a CH1 region as depicted in FIG. 10). While the “hinge” based domain linkers in this Figure are based on IgG1 hinge, hinge regions from other IgG isotypes may also be used. In the case of IgG2, the hinge sequence may include C219S and/or C220S substitutions. Additionally, each of these domain linkers may be used in multiples (e.g. EAAAKEAAAK; SEQ ID NO:775) or in combination (e.g. EAAAKEPKSSDKTHTCPPCP; SEQ ID NO:776).

[0041] FIGS. 9A-9E show the sequences of several useful heterodimeric IL18 fusion backbones based on human IgG, without the cytokine, Fv sequences, or domain linkers. Heterodimeric Fc backbone 1 is based on human IgG1 (356E/358M allotype), and includes the L368D/K370S skew variants and the Q295E/N384D/Q418E/N421D pI variants on a first heterodimeric Fc chain, the S364K/E357Q skew variants on a second heterodimeric Fc chain, and the E233P/L234V/L235A/G236del/S267K ablation variants . Heterodimeric Fc backbone 2 is based on human IgG1 (356E/358M allotype), and includes the L368D/K370S skew variants and the Q295E/N384D/Q418E/N421D pI variants on a first heterodimeric Fc chain, the S364K skew variant on a second heterodimeric Fc chain, and the E233P/L234V/L235A/G236del/S267K ablation variants . Heterodimeric Fc backbone 3 is based on human IgG1 (356E/358M allotype), and includes the L368E/K370S skew variants and the Q295E/N384D/Q418E/N421D pI variants on a first heterodimeric Fc chain, the S364K skew variant on a second heterodimeric Fc chain, and the E233P/L234V/L235A/G236del/S267K ablation variants . Heterodimeric Fc backbone 4 is based on human IgG1 (356E/358M allotype), and includes the K360E/Q362E/T411E skew variants and the Q295E/N384D/Q418E/N421D pI variants on a first heterodimeric Fc chain, the D401K skew variant on a second heterodimeric Fc chain, and the E233P/L234V/L235A/G236del/S267K ablation variants. Heterodimeric Fc backbone 5 is based on human IgG1 (356D/358L allotype), and includes the L368D/K370S skew variants and the Q295E/N384D/Q418E/N421D pI variants on a first heterodimeric Fc chain, the S364K/E357Q skew variants on a second heterodimeric Fc chain, and the E233P/L234V/L235A/G236del/S267K ablation variants. Heterodimeric Fc backbone 6 is based on human IgG1 (356E/358M allotype), and includes the L368D/K370S skew variants and the Q295E/N384D/Q418E/N421D pI variants on a first heterodimeric Fc chain, the S364K/E357Q skew variants on a second heterodimeric Fc chain, and the E233P/L234V/L235A/G236del/S267K ablation variants, N297A variant that removes glycosylation, . Heterodimeric Fc backbone 7 is based on human IgG1 (356E/358M allotype), and includes the L368D/K370S skew variants and the Q295E/N384D/Q418E/N421D pI variants on a first heterodimeric Fc chain, the S364K/E357Q skew variants on a second heterodimeric Fc chain, and the E233P/L234V/L235A/G236del/S267K ablation variants, N297S variant that removes glycosylation, . Heterodimeric Fc backbone 8 is based on human IgG4, and includes the L368D/K370S skew variants and the Q295E/N384D/Q418E/N421D pI variants on a first heterodimeric Fc chain, the S364K/E357Q skew variants on a second heterodimeric Fc chain, and the S228P (according to EU numbering, S241P in Kabat) variant that ablates Fab arm exchange (as is known in the art) on both chains. Heterodimeric Fc backbone 9 is based on human IgG2, and includes the L368D/K370S skew variants and the Q295E/N384D/Q418E/N421D pI variants on a first heterodimeric Fc chain, the S364K/E357Q skew variants on a second heterodimeric Fc chain. Heterodimeric Fc backbone 10 is based on human IgG2, and includes the L368D/K370S skew variants and the Q295E/N384D/Q418E/N421D pI variants on a first heterodimeric Fc chain, the S364K/E357Q skew variants on a second heterodimeric Fc chain, and the S267K ablation variant on both chains. Heterodimeric Fc backbone 11 is based on human IgG1 (356E/358M allotype), and includes the L368D/K370S skew variants and the Q295E/N384D/Q418E/N421D pI variants on a first heterodimeric Fc chain, the S364K/E357Q skew variants on a second heterodimeric Fc chain, and the E233P/L234V/L235A/G236del/S267K ablation variants, M428L/N434S Xtend variants, . Heterodimeric Fc backbone 12 is based on human IgG1 (356E/358M allotype), and includes the L368D/K370S skew variants on a first heterodimeric Fc chain, the S364K/E357Q skew variants and P217R/P229R/N276K pI variants on a second heterodimeric Fc chain, and the E233P/L234V/L235A/G236del/S267K ablation variants. Heterodimeric Fc backbone 13 is based on human IgG1 (356E/358M allotype), and includes the L368D/K370S skew variants and the Q295E/N384D/Q418E/N421D pI variants on a first heterodimeric Fc chain, the S364K/E357Q skew variants on a second heterodimeric Fc chain, and the E233P/L234V/L235A/G236del/S267K ablation variants and M428L/N434A Xtend variants on both chains. Heterodimeric Fc backbone 14 is based on human IgG1 (356D/358L allotype), and includes the L368D/K370S skew variants and the Q295E/N384D/Q418E/N421D pI variants on a first heterodimeric Fc chain, the S364K/E357Q skew variants on a second heterodimeric Fc chain, and the E233P/L234V/L235A/G236del/S267K ablation variants and M428L/N434A Xtend variants on both chains. Heterodimeric Fc backbone 15 is based on human IgG1 (356E/358M allotype), and includes the L368D/K370S skew variants, the Q295E/N384D/Q418E/N421D pI variants, and H435R/Y436 rapid purification variants on a first heterodimeric Fc chain, the S364K/E357Q skew variants on a second heterodimeric Fc chain, and the E233P/L234V/L235A/G236del/S267K ablation variants on both chains. Heterodimeric Fc backbone 16 is based on human IgG1 (356E/358M allotype), and includes the L368D/K370S skew variants and the Q295E/N384D/Q418E/N421D pI variants on a first heterodimeric Fc chain, the S364K/E357Q skew variants and H435R/Y436 rapid purification variants on a second heterodimeric Fc chain, and the E233P/L234V/L235A/G236del/S267K ablation variants on both chains. Heterodimeric Fc backbone 17 is based on human IgG1 (356E/358M allotype), and includes the L368D/K370S skew variants, the Q295E/N384D/Q418E/N421D pI variants, and H435R/Y436 rapid purification variants on a first heterodimeric Fc chain, the S364K/E357Q skew variants on a second heterodimeric Fc chain, and the E233P/L234V/L235A/G236del/S267K ablation variants and M428L/N434S Xtend variants on both chains. Heterodimeric Fc backbone 18 is based on human IgG1 (356E/358M allotype), and includes the L368D/K370S skew variants and the Q295E/N384D/Q418E/N421D pI variants on a first heterodimeric Fc chain, the S364K/E357Q skew variants and H435R/Y436 rapid purification variants on a second heterodimeric Fc chain, and the E233P/L234V/L235A/G236del/S267K ablation variants and M428L/N434S Xtend variants on both chains.

[0042] As will be appreciated by those in the art and outlined below, these sequences can be used with any IL18 fusion formats requiring a heterodimeric Fc region. It should be noted that the backbones may further comprise deletion of K447 (i.e. K447_ or K447del) on one or both chains. These sequences can also be used with any of the IL18 x Fab-Fc fusions of the invention. In targeted IL-10 fusion formats which include a variable heavy domain covalently linked to the Fc, the variable heavy domain may be covalently linked to the Fc domain by a corresponding CH1 domain (as depicted in FIG. 10) and domain linkers (as depicted in FIG. 8). Additionally, each of these backbone sequences may include the H435R/Y436F variants on monomer 1 or monomer 2 to ablate Protein A binding.

[0043] Included within each of these backbones are sequences that are 90, 95, 98 and 99% identical (as defined herein) to the recited sequences, and/or contain from 1, 2, 3, 4, 5, 6, 7, 8, 9 or 10 additional amino acid substitutions (as compared to the “parent” of the Figure, which, as will be appreciated by those in the art, already contain a number of amino acid modifications as compared to the parental human IgG1 (or IgG2 or IgG4, depending on the backbone). That is, the recited backbones may contain additional amino acid modifications (generally amino acid substitutions) in addition or as an alternative to the skew, pI and ablation variants contained within the backbones of this Figure.

[0044] FIG. 10 depicts illustrative CH1 regions which may find use in covalently linking a variable domain to the backbones as depicted in FIG. 9A-E (optionally via a domain linker as depicted in FIG. 8) in the context of IL18 x Fab-Fc fusions.

[0045] FIG. 11 depicts the “non-Fv” backbone of cognate light chains (i.e. constant light chain) which find use in the IL18 x Fab-Fc fusion proteins of the invention.

[0046] FIGS. 12A-12B depicts illustrative formats for IL18 fusions of the invention. The monovIL18-Fc format (FIG. 12A) comprises a first monomer comprising an IL18 monomer covalently attached to the N-terminus of a first heterodimeric Fc chain (optionally via a domain linker) and a second monomer comprising a complementary second heterodimeric Fc chain that is “Fc-only” or “empty-Fc”. The IL18 x Fab-Fc format (FIG. 12B) comprises a first monomer comprising an IL18 monomer covalently attached to the N-terminus of a first heterodimeric Fc chain (optionally via a domain linker), a second monomer comprising a variable heavy (VH) region covalently attached to the N-terminus of a complementary second heterodimeric Fc chain, and a third monomer that is a corresponding light chain that forms a Fab with the second monomer.

[0047] FIGS. 13A-13B depict sequences for IL18 production variant comprising C38S, C68S, C76S and/or C127S.

[0048] FIG. 14 depicts sequences for IL18 production variants engineered to remove C-terminal aspartic acid.

[0049] FIGS. 15A-15B depict sequences for IL18 single substitution affinity variants (Library 1). It should be noted that each of these variants may include additional substitutions such as production variants, affinity variants, and/or stability variants.

[0050] FIGS. 16A-16C depict sequences for IL18 single substitution affinity variants (Library 2). It should be noted that each of these variants may include additional substitutions such as production variants, affinity variants, and/or stability variants.

[0051] FIGS. 17 depicts sequences for IL18 combo substitution affinity variants (Library 2). It should be noted that each of these variants may include additional substitutions such as production variants, affinity variants, and/or stability variants.

[0052] FIG. 18 depicts additional affinity variants which may find use in the IL18 fusion proteins of the invention.

[0053] FIGS. 19A-19I depicts sequences for IL18 stability variants (Library 1). It should be noted that each of these stability variants include the 4CS substitutions, unless reversion to cysteine is explicitly denoted i.e. S38C, S68C, S76C, and/or S127C. However, it should be noted that the variants at positions other than 38, 68, 76, or 127 may be used independently from the 4CS substitutions. Additionally, it should be noted that each of these variants may include additional substitutions such as production variants, affinity variants, and/or stability variants.

[0054] FIGS. 20A-20C depict sequences for IL18 stability variants (Library 2). It should be noted that each of these stability variants include the 4CS substitutions, unless alternative substitution at residues 38, 68, 76, and/or 127 is explicitly denoted e.g. S38E. However, it should be noted that the substitutions other than C38S, C68S, C76S, and C127S may be used independently from the 4CS substitutions. Additionally, it should be noted that each of these variants may include additional substitutions such as production variants, affinity variants, and/or stability variants.

[0055] FIG. 21A-21M depict the sequences for illustrative IL18 fusions of the monovIL18-Fc format comprising WT human IL18 or human IL18 variants. Slashes (/) indicate the border(s) between IL18 monomer, linkers, and Fc regions. It should be noted that IL18 sequences that are 90, 95, 98 and 99% identical (as defined herein), and/or contain from 1, 2, 3, 4, 5, 6, 7, 8, 9 or 10 additional amino acid substitutions and/or exclude amino acid substitutions, including production, affinity, and stability substitutions. Additionally, each of the monovIL18-Fc sequences may utilize alternative backbones (including, but not limited, to those depicted in FIG. 9A-E).

[0056] FIGS. 22A-22CZ depict the sequences for illustrative 11,18 fusions of the 11,18 x Fab-Fc format comprising WT human IL18 or human IL18 variants. Slashes (/) indicate the border(s) between IL18 monomer, linkers, and Fc regions. It should be noted that IL18 sequences that are 90, 95, 98 and 99% identical (as defined herein), and/or contain from 1, 2, 3, 4, 5, 6, 7, 8, 9 or 10 additional amino acid substitutions and/or exclude amino acid substitutions, including production, affinity, and stability substitutions. Additionally, each of the IL18 x Fab-Fc sequences may utilize alternative backbones (including, but not limited, to those depicted in FIG. 9A-E) or alternative variable heavy and variable light domains.

[0057] FIGS. 23A-23B depict A) chromatogram illustrating purification part 2 of XENP30792 (anion exchange chromatography following protein A chromatography), and the heterogeneity of pre-purified material and material from peak B isolated from anion exchange separation as depicted in FIG. 23A by B) analytical size-exclusion chromatography with multi-angle light scattering (aSEC-MALS). FIG. 23B also depicts the molecular weight of protein species as determined by multi-angle light scattering.

[0058] FIGS. 24A-24B depict A) chromatogram illustrating purification part 2 of XENP31296 (anion exchange chromatography following protein A chromatography), and the heterogeneity of pre-purified material and purity of material from peak B isolated from anion exchange separation as depicted in FIG. 24A by B) analytical size-exclusion chromatography with multi-angle light scattering (aSEC-MALS). FIG. 24B also depicts the molecular weight of protein species as determined by multi-angle light scattering.

[0059] FIGS. 25A-25B depict A) chromatogram illustrating purification part 2 of XENP37827 (anion exchange chromatography following protein A chromatography), and the purity material from peak B isolated from anion exchange separation as depicted in FIG. 25A by B) analytical size-exclusion chromatography with multi-angle light scattering (aSEC-MALS). FIG. 25B also depicts the molecular weight of protein species as determined by multi-angle light scattering.

[0060] FIGS. 26A-26B depict A) dose dependent activation of KG-1 cells (as indicated by PD-L1 expression) by recombinant human IL18 and B) dose dependent neutralization of IL18 activity on KG-1 cells (as indicated by PD-1 expression) by IL18BP in the presence of 0.86 nM (100 ng/ml) recombinant human IL18.

[0061] FIG. 27 depicts activation of KG-1 cells (as indicated by induction of PD-L1 expression) by IL18 affinity variants (in the context of IL18 x Fab-Fc fusions having a silent Fv). The data show that a number of substitutions enabled reduced activation potency in comparison to WT-4CS variant.

[0062] FIGS. 28A-28S depict activation of KG-1 cells (as indicated by induction of PD-L1 expression) by IL18 affinity variants (in the context of IL18 x Fab-Fc fusions having a silent Fv) in the absence of IL18BP (solid symbols/solid lines) or in the presence of 100 ng/ml IL18BP (open symbol/dotted lines). The data show that a number of substitutions enabled reduced activation potency in comparison to WT-4CS variant. For most of the variants, incubation with IL18BP shifts the activation potency; however, XENP38865 having the K53A appear minimally impacted by IL18BP indicating that the K53A substitution reduces binding affinity and sink by IL18BP.

[0063] FIG. 29 shows dose dependent inhibition of KG-1 cell activation (as indicated by induction of PD-L1 expression) by IL18BP and fixed concentration (10 nM) IL18 affinity variants (in the context of IL18 x Fab-Fc fusions having a silent Fv). The data show that some of the variants were very sensitive to IL18BP inhibition. However, XENP38865 having the K53A substitution was much less susceptible to IL18BP inhibition (as indicated by higher IC50 value of 88.73 nM in comparison to IC50 value of 5.503 for XENP37827 having WT-4CS IL18).

[0064] FIG. 30 shows dose dependent inhibition of KG-1 cell activation (as indicated by induction of PD-L1 expression) by IL18BP and fixed concentration (10 nM) IL18 affinity variants (in the context of IL18 x Fab-Fc fusions having a silent Fv).

[0065] FIG. 31 depicts BLI-response by IL18 x Fab-Fc fusions comprising IL18 affinity variants (Library 2) for IL18R1, IL18BP, and IL18R1xIL18RAP heterodimer as determined by Octet. The data show that the K53D and K53N single substitution variants exhibited weaker binding response to IL18R1 and IL18R1xIL18RAP but also no binding response to IL18BP. Several other substitutions at K53 also enabled weakened binding for both IL18R1 and IL18BP, albeit not to the same level of weaked IL18BP binding as K53D and K53N; S55N and S55Q enabled weakened binding to IL18R1 and IL18BP, although at the expense of stability (as depicted in FIGS. 35); and M41K enabled enhanced binding for IL18R1.

[0066] FIG. 32 depicts activation of KG-1 cells (as indicated by induction of PD-L1 expression) by IL18 affinity variants (in the context of IL18 x Fab-Fc fusions having a silent Fv) in the absence of IL18BP.

[0067] FIG. 33 depicts activation of KG-1 cells (as indicated by induction of PD-L1 expression) by IL18 affinity variants (in the context of IL18 x Fab-Fc fusions having a silent Fv) in the absence of IL18BP. The M51K variant appears to improve IL18 response.

[0068] FIG. 34 depicts activation of KG-1 cells (as indicated by induction of PD-L1 expression) by IL18 affinity variants (in the context of IL18 x Fab-Fc fusions having a silent Fv) in the absence of IL18BP.

[0069] FIG. 35 depicts activation of KG-1 cells (as indicated by induction of PD-L1 expression) by IL18 affinity variants (in the context of IL18 x Fab-Fc fusions having a silent Fv) in the absence of IL18BP.

[0070] FIG. 36 depicts melting temperature of IL18 affinity variants (Library 1) in the context of IL18 x Fab-Fc fusions having a silent Fv.

[0071] FIG. 37 depicts melting temperature of IL18 affinity variants (Library 2) in the context of IL18 x Fab-Fc fusions having a silent Fv and RP variants. K53N, P57A, and P57E increased Tm1 respectively by 5, 9.5, and 12° C. Several substitutions, including alternative substitutions as the aforementioned positions (e.g. K53I), decreased Tm1 by as much as 11.5° C.

[0072] FIG. 38 depicts sequence alignment of IL18 from various species.

[0073] FIGS. 39A-39B depict melting temperature of IL18 stability variants (Library 1) in the context of IL18 x Fab-Fc fusions having a silent Fv and RP variants.

[0074] FIG. 40 depicts melting temperature of IL18 stability variants (Library 2) in the context of IL18 x Fab-Fc fusions having a silent Fv and RP variants.

[0075] FIGS. 41A-41C depicts sequences for Further Variants (Library 1) which explored combinations of favorite variants from Stability Variants (Libraries 1 and 2). It should be noted that each of these variants may include additional substitutions such as production variants, affinity variants, and/or additional stability variants. Additionally, while these variants were produced with delD193 as they were assessed in the context of His-tagged molecules, these IL18 variants may be produced without delD193.

[0076] FIGS. 42A-42D depicts sequences for Further Variants (Library 2) which explored further substitutions at positions identified from Affinity Variants (Libraries 1 and 2) as well as at newly identified positions S36 and D132. It should be noted that each of these variants may include additional substitutions such as production variants, additional affinity variants, and/or stability variants.

[0077] FIGS. 43A-43b depicts sequences for Further Variants (Library 3) which explored combinations of favorite affinity variants with S10C/N155C. It should be noted that each of these variants may include additional substitutions such as production variants, affinity variants, and/or stability variants.

[0078] FIGS. 44A-44C depicts sequences for Further Variants (Library 4) which explored combinations of favorite affinity variants. In particular in certain combinations, variants enhanced in IL18 receptor binding were combined with K53D to restore its reduced IL18 receptor binding. It should be noted that each of these variants may include additional substitutions such as production variants, affinity variants, and/or stability variants.

[0079] FIG. 45 depicts IL18 positions and substitutions for modulating IL18 binding affinity for IL18 receptors and/or IL18BP. It should be noted that these substitutions can be combined with any other substitutions such as production variants, additional affinity variants, and/or stability variants. The numbering is in the context of Human IL18 mature form sequence as depicted in FIG. 1.

[0080] FIG. 46 depicts IL18 positions and substitutions for improving stability. It should be noted that these substitutions can be combined with any other substitutions such as production variants, affinity variants, and/or additional stability variants. The numbering is in the context of Human IL18 mature form sequence as depicted in FIG. 1.

[0081] FIG. 47 depicts additional IL18 positions and substitutions for improving stability, specifically in the context of cysteine engineering. These substitutions remove existing cysteine residues or introduce new cysteine residues. It should be noted that these substitutions can be combined with any other substitutions such as production variants, affinity variants, and/or additional stability variants. The numbering is in the context of Human IL18 mature form sequence as depicted in FIG. 1.

[0082] FIG. 48 depicts binding to human IL18BP, cynomolgus IL18BP, human IL18R1, cynomolgus IL18R1, human IL18R1/IL18RAP complex, and cynomolgus IL18R1/IL18RAP complex by additional IL18 affinity variants (in the context of 4CS and S10C/N155C variants). The data show that K53D is the most important residue related to detuning IL18BP binding, and K53A and P57E are the next two most important.

[0083] FIG. 49 depicts activation of KG-1 cells (as indicated by induction of PD-L1 expression) by additional IL18 combination affinity variants (in the context of monovIL18-Fc fusions). Affinity variants were engineered in the context of IL18-4CS further including S10C/N155C stability variants.

[0084] FIG. 50A-50E depicts activation of KG-1 cells (as indicated by induction of PD-L1 expression) by additional 11,18 combination affinity variants in the absence of IL18BP (solid lines) or in the presence of 100 ng/ml IL18BP (dotted lines). Affinity variants were engineered in the context of IL18-4CS further including S10C/N155C stability variants. Vertical line indicates 100 ng/mL IL18BP =5.56 nM.

[0085] FIG. 51 depicts EC50 of activation of KG-1 cells (as indicated by induction of PD-L1 expression) by additional 11,18 combination affinity variants in the absence of IL18BP (solid lines) or in the presence of 100 ng/ml IL18BP (dotted lines). Affinity variants were engineered in the context of IL18-4CS further including S10C/N155C stability variants.

[0086] FIG. 52 depicts activation of KG-1 cells (as indicated by induction of PD-L1 expression) by additional 11,18 combination affinity variants. New affinity variants were engineered in the context of IL18-4CS further including S10C/N155C stability variants.

[0087] FIG. 53A-53L depicts activation of KG-1 cells (as indicated by induction of PD-L1 expression) by additional 11,18 combination affinity variants in the absence of IL18BP (solid lines) or in the presence of 1 pg/ml IL18BP (dotted lines). New affinity variants were engineered in the context of IL18-4CS further including S10C/N155C stability variants. Vertical line indicates 1 pg/mL IL18BP =55.56 nM.

[0088] FIG. 54 depicts EC50 of activation of KG-1 cells (as indicated by induction of PD-L1 expression) by additional 11,18 combination affinity variants in the absence of IL18BP or in the presence of 1 μg/ml IL18BP. Affinity variants were engineered in the context of IL18-4CS further including S10C/N155C stability variants.

[0089] FIG. 55 depicts activation of KG-1 cells (as indicated by induction of PD-L1 expression) by additional single substitution 11,18 affinity variants. New affinity variants were engineered in the context of IL18-4CS further including S10C/N155C stability variants.

[0090] FIG. 56 depicts activation of KG-1 cells (as indicated by induction of PD-L1 expression) by additional single substitution 11,18 affinity variants. New affinity variants were engineered in the context of IL18-4CS further including S10C/N155C stability variants.

[0091] FIG. 57 depicts activation of KG-1 cells (as indicated by induction of PD-L1 expression) by additional 11,18 combination affinity variants. New affinity variants were engineered in the context of IL18-4CS further including S10C/N155C stability variants.

[0092] FIG. 58 depicts activation of KG-1 cells (as indicated by induction of PD-L1 expression) by additional 11,18 combination affinity variants. New affinity variants were engineered in the context of IL18-4CS further including S10C/N155C stability variants.

[0093] FIG. 59 depicts activation of KG-1 cells (as indicated by induction of PD-L1 expression) by additional 11,18 combination affinity variants. New affinity variants were engineered in the context of IL18-4CS further including S10C/N155C stability variants.

[0094] FIGS. 60A-60K depicts activation of KG-1 cells (as indicated by induction of PD-L1 expression) by additional 11,18 combination affinity variants in the absence of IL18BP (solid lines) or in the presence of 1 μg/ml IL18BP (dotted lines). New affinity variants were engineered in the context of IL18-4CS further including S10C/N155C stability variants. Vertical line indicates 1 μg/mL IL18BP =55.56 nM.

[0095] FIG. 61 depicts activation of KG-1 cells (as indicated by induction of PD-L1 expression) by additional 11,18 combination affinity variants. New affinity variants were engineered in the context of IL18-4CS further including S10C/N155C stability variants.

[0096] FIG. 62 depicts EC50 of activation of KG-1 cells (as indicated by induction of PD-L1 expression) by additional 11,18 combination affinity variants and their fold reduction from WT* (*note: 11,18 comprising 4CS and S10C/N155C).

[0097] FIG. 63 depicts activation of KG-1 cells (as indicated by induction of PD-L1 expression) by selected IL18 potency variants in the context of monovIL18-Fc (solid symbol) or IL18 x Fab-Fc (open symbol). The data suggest that IL18 x Fab-Fc fusions have lower Ymax (efficacy).

[0098] FIGS. 64A-64E depicts change in body weight (as an indicator of GVHD) by A) Day 6, B) Day 9, C) Day 13, D) Day 16, and E) over time in huPBMC-engrafted NSG mice dosed with PBS or potency reduced IL18 fusion proteins at 5.0 mg/kg or 0.5 mg/kg. Test articles included XENP40967 (3-fold reduction from WT), XENP40685 (17-fold reduction from WT), XENP40966 (219-fold reduction from WT), XENP40962 (210-fold reduction from WT), and XENP40965 (9220-fold reduction from WT).

[0099] FIGS. 65A-65B depicts serum huIL-18BP on A) Day 7 and B) Day 14 in huPBMC-engrafted NSG mice dosed with PBS or potency reduced IL18 fusion proteins at 5.0 mg/kg or 0.5 mg/kg. Test articles included XENP40967 (3-fold reduction from WT), XENP40685 (17-fold reduction from WT), XENP40966 (219-fold reduction from WT), XENP40962 (210-fold reduction from WT), and XENP40965 (9220-fold reduction from WT). The data show that the IL18 fusion proteins induced huIL18BP over time.

[0100] FIGS. 66A-66C depicts expansion of A) human CD4 T cells, B) human CD8 T cell, and C) human CD16/CD56 NK cells by Day 14 in huPBMC-engrafted NSG mice dosed with PBS or potency reduced IL18 fusion proteins at 5.0 mg/kg or 0.5 mg/kg. Test articles included XENP40967 (3-fold reduction from WT), XENP40685 (17-fold reduction from WT), XENP40966 (219-fold reduction from WT), XENP40962 (210-fold reduction from WT), and XENP40965 (9220-fold reduction from WT). The data show T cell expansion generally correlated with IL18 potency (and was dose dependent).

[0101] FIG. 67 depicts activation of human CD16/CD56 NK cells (as indicated by NKG2D expression) by Day 7 in huPBMC-engrafted NSG mice dosed with PBS or potency reduced IL18 fusion proteins at 5.0 mg/kg or 0.5 mg/kg. Test articles included XENP40967 (3-fold reduction from WT), XENP40685 (17-fold reduction from WT), XENP40966 (219-fold reduction from WT), XENP40962 (210-fold reduction from WT), and XENP40965 (9220-fold reduction from WT).

[0102] FIGS. 68A-68B depicts serum IFNy on A) Day 7 and B) Day 14 in huPBMC-engrafted NSG mice dosed with PBS or potency reduced IL18 fusion proteins at 5.0 mg/kg or 0.5 mg/kg. Test articles included XENP40967 (3-fold reduction from WT), XENP40685 (17-fold reduction from WT), XENP40966 (219-fold reduction from WT), XENP40962 (210-fold reduction from WT), and XENP40965 (9220-fold reduction from WT). The data show that the IL18 fusion proteins induced IFNy over time.

[0103] FIGS. 69A-69B depicts serum GM-CSF on A) Day 7 and B) Day 14 in huPBMC-engrafted NSG mice dosed with PBS or potency reduced IL18 fusion proteins at 5.0 mg/kg or 0.5 mg/kg. Test articles included XENP40967 (3-fold reduction from WT), XENP40685 (17-fold reduction from WT), XENP40966 (219-fold reduction from WT), XENP40962 (210-fold reduction from WT), and XENP40965 (9220-fold reduction from WT). The data show that the IL18 fusion proteins induced serum GM-CSF over time.

[0104] FIGS. 70A-70C depicts serum concentration of IL18 fusion proteins over time in C57/B16 mice after dosing with 2 mg/kg XENP39804 (monovIL18-Fc with 4CS/E31Q variant), XENP40685 (monovIL18-Fc with 4CS/E31Q variant and further including S10C/N155C), or XENP40686 (IL18 x Fab-Fc with 4CS/E31Q variant and further including S10C/N155C). The data show improvement in serum levels upon introduction of the S10C/N155C disulfide variant into the E31Q base (i.e. XENP40685 vs. XENP39804). The IL18 x Fab-Fc format did not appear to confer any further improvements (i.e. XENP40686 vs. XENP40685).

[0105] FIG. 71 depicts human PBMCs stimulated with 500 ng/mL plate-bound anti-CD3 (OKT3) for 48 h and then analyzed by flow cytometry. Gates were selected for naïve (CD28+CD95−), memory (CD28+CD95+), and effector (CD28-CD95mid) T cells. Central Memory (Tcm) and Stem-cell like memory (Tscm) T cells were further gated by CD45RA- or CD45RA+, respectively. Counts and IL18R1 expression were consistent between CD4 and CD8 populations. Data show that IL18R1 expression is biased towards NKs and memory T cell sub sets.

[0106] FIG. 72 depicts the unfolding transition of various IL18 variants as determined by differential scanning fluorimetry.

[0107] FIG. 73 depicts the stabilization of IL18 that enabled improved solution behavior and facile purification. Analytical SEC and analytical IEX chromatograms of purified, stabilized IL18-Fc material are depicted in FIG. 73A and 73B.

[0108] FIG. 74A-74C depicts activation of KG-1 cells (as indicated by induction of PD-L1 expression) by A) XENP41756 (4CS S10C/N155C), B) XENP42006 (4CS E6Q/S10C/K53D/N111T/N155C), and C) XENP41762 (4CS S10C/K53D/N155C) in the absence of IL18BP (solid circle) or in the presence of 10 pg/ml IL18BP (open). Vertical line indicates 10 pg/mL IL18BP=555 nM.

[0109] FIG. 75A-75G depicts change in body weight (as an indicator of GVHD) by A) Day 8, B) Day 12, C) Day 15, D) Day 19, E) Day 25, F) Day 28, and G) Day 33 in huPBMC-engrafted NSG mice dosed with PBS or indicate concentrations of XENP41770 (4CS S10C/E31Q/D35N/N155C), XENP42006 (4CS E6Q/S10C/K53D/N111T/N155C), and XENP41762 (4CS S10C/K53D/N155C).

[0110] FIG. 76A-B depicts expansion of A) human CD3 T cells and B) human NK cells on Day 14 in huPBMC-engrafted NSG mice dosed with PBS or indicate concentrations of XENP41770, XENP42006, and XENP41762.

[0111] FIG. 77 depicts serum IFNy on Day 7 in huPBMC-engrafted NSG mice dosed with PBS or indicate concentrations of XENP41770, XENP42006, and XENP41762.

[0112] FIG. 78 depicts serum concentration of XENP41974 (4CS S10C/N155C) (total IL18-Fc vs. active IL18-Fc) over time in cynomolgus monkeys. Total IL18-Fc includes IL18-Fc with and without bound IL18BP, and active IL18-Fc is unbound.

[0113] FIG. 79 depicts serum concentration of XENP42007 (4CS E6Q/S10D/K53D/N111T) (total IL18-Fc vs. active IL18-Fc) over time in cynomolgus monkeys. Total IL18-Fc includes IL18-Fc with and without bound IL18BP, and active IL18-Fc is unbound.

[0114] FIGS. 80A-80P depicts the amino acid sequences of IL18-Fc fusion of the disclosure.

[0115] FIG. 81 depicts secretion of IP10 by human PBMCs upon stimulation with IL18-Fc fusions XENP42141, XENP42143, and XENP42145.

[0116] FIG. 82A-82F depict activation of mouse NK1.1 cells (as indicated by induction of intracellular IFNy) by murine IL18-Fc fusion having murine IL18 variants.

[0117] FIG. 83A-83D depict binding to murine IL18BP by murine IL18-Fc fusion having murine IL18 variants. The data show that incorporating L59K dramatically lowers affinity to IL18BP (XENP43092 in FIG. 83A and FIG. 83B), adding K52X to L59K abrogates IL18BP binding (FIG. 83C), and adding E30Q or D34N does not modulate IL18BP binding (FIG. 83D).

[0118] FIG. 84A-84J Sensorgrams depicting binding by IL18-Fc fusions for IL18BP as determined by Octet. It should be noted that this experiment was intended to ascertain binding and not intended for accurate KD measurements, but it does show relative ranking of binding enabled by various IL18 variants.

[0119] FIG. 85A-85J Sensorgrams depicting binding by IL18-Fc fusions for IL18R1xIL18RAP heterodimer as determined by Octet. It should be noted that this experiment was intended to ascertain binding and not intended for accurate KD measurements, but it does show relative ranking of binding enabled by various IL18 variants.

### DETAILED DESCRIPTION

[0120] I. Overview

[0121] Provided herein are IL18-Fc fusion proteins that include an empty-Fc domain and an IL18 protein connected to another Fc domain. Also provided herein are additional IL18-Fc fusion proteins such as IL18 x Fab-Fc fusion proteins that include a first monomer containing an IL18 protein connected to a first Fc domain, a second monomer containing a variable heavy chain connected to a second Fc domain, and a variable light chain, such that the variable heavy and light chains form an empty Fab. Such IL18-Fc fusion proteins exhibit IL18 biological activity and long serum half-lives. Due to the long serum half-lives, the fusion proteins advantageously do not require high doses for use in treatments, thereby minimizing any potential systemic toxicity associated with increased IL18 levels. The IL18-Fc fusion proteins can be used for applications where increased IL18 activity is useful, for example, for increasing an immune response which can be useful for mounting an anti-cancer response in a subject in need thereof. Also described herein are various variant IL18 proteins with modifications to improve production (e.g., by improving yield and/or reduce heterogeneity), improve stability, reduce sink, and/or reduced affinity/potency.

[0122] II. Definitions

[0123] In order that the application may be more completely understood, several definitions are set forth below. Such definitions are meant to encompass grammatical equivalents.

[0124] By “IL-18,” “Interleukin-18,” and “IL18” herein is meant a proinflammatory cytokine that binds to IL18 receptor (IL18R1). IL18 is capable of stimulating IFNy production and regulating Th1 and Th2 responses. Sequences of various IL18 proteins, corresponding IL18 receptors, IL18 receptor accessory proteins (IL18RAPs), and IL18 binding proteins (IL18BPs) are shown in FIGS. 1-3. Sequences of exemplary wildtype human precursor and mature IL-18, as well as the IL-18 receptor subunits are included in FIGS. 1A-1B.

[0125] By “ablation” herein is meant a decrease or removal of binding and/or activity. Thus for example, “ablating FcγR binding” means the Fc region amino acid variant has less than 50% starting binding as compared to an Fc region not containing the specific variant, with more than 70-80-90-95-98% loss of binding being preferred, and in general, with the binding being below the level of detectable binding in a Biacore assay. Of particular use in the ablation of FcγR binding are those shown in FIG. 6. However, unless otherwise noted, the Fc monomers of the invention retain binding to the FcRn.

[0126] By “ADCC” or “antibody dependent cell-mediated cytotoxicity” as used herein is meant the cell-mediated reaction wherein nonspecific cytotoxic cells that express FcγRs recognize bound antibody on a target cell and subsequently cause lysis of the target cell. ADCC is correlated with binding to FcγRllla; increased binding to FcγRllla leads to an increase in ADCC activity. As is discussed herein, some embodiments ablate ADCC activity entirely.

[0127] By “modification” herein is meant an amino acid substitution, insertion, and/or deletion in a polypeptide sequence or an alteration to a moiety chemically linked to a protein. For example, a modification may be an altered carbohydrate or PEG structure attached to a protein. By “amino acid modification” herein is meant an amino acid substitution, insertion, and/or deletion in a polypeptide sequence. For clarity, unless otherwise noted, the amino acid modification is always to an amino acid coded for by DNA, e.g., the 20 amino acids that have codons in DNA and RNA.

[0128] By “amino acid substitution” or “substitution” herein is meant the replacement of an amino acid at a particular position in a parent polypeptide sequence with a different amino acid. In particular, in some embodiments, the substitution is to an amino acid that is not naturally occurring at the particular position, either not naturally occurring within the organism or in any organism. For example, the substitution E272Y or 272Y refers to a variant polypeptide, in this case an Fc variant, in which the glutamic acid at position 272 is replaced with tyrosine. For clarity, a protein which has been engineered to change the nucleic acid coding sequence but not to change the starting amino acid (for example exchanging CGG (encoding arginine) to CGA (still encoding arginine) to increase host organism expression levels) is not an “amino acid substitution”; that is, despite the creation of a new gene encoding the same protein, if the protein has the same amino acid at the particular position that it started with, it is not an amino acid substitution.

[0129] By “amino acid insertion” or “insertion” as used herein is meant the addition of an amino acid residue or sequence at a particular position in a parent polypeptide sequence. For example, -233E designates an insertion of glutamic acid after position 233 and before position 234. Additionally, -233ADE or A233ADE designates an insertion of AlaAspGlu after position 233 and before position 234.

[0130] By “amino acid deletion” or “deletion” as used herein is meant the removal of an amino acid residue or sequence at a particular position in a parent polypeptide sequence. For example, E233-, E233#, E2330, E233_, or E233del designates a deletion of glutamic acid at position 233. Additionally, EDA233- or EDA233# designates a deletion of the sequence GluAspAla that begins at position 233.

[0131] By “variant protein”, “protein variant”, or “variant” as used herein is meant a protein that differs from that of a parent protein by virtue of at least one modification. Protein variant may refer to the protein itself, a composition comprising the protein, the amino acid sequence that encodes it, or the DNA sequence that encodes it. Preferably, the protein variant has at least one amino acid modification compared to the parent protein, e.g. from about one to about seventy amino acid modifications, and preferably from about one to about five amino acid modifications compared to the parent. The modification can be an addition, deletion, or substitution. As described below, in some embodiments the parent protein, for example an Fc parent polypeptide, is a human wild type sequence, such as the Fc region from IgG1, IgG2, IgG3 or IgG4. The protein variant sequence herein will preferably possess at least about 80% identity with a parent protein sequence, and most preferably at least about 90% identity, more preferably at least about 95-98-99% identity. “Variant,” as used herein can also refer to particular amino acid modifications (e.g., substitutions, deletions, insertions) in a variant protein (e.g., a variant Fc domain), for example, heterodimerization variants, ablation variants, FcKO variants, etc., as disclosed in Section III below.

[0132] As used herein, by “protein” is meant at least two covalently attached amino acids, which includes proteins, polypeptides, oligopeptides and peptides. When a biologically functional molecule comprises two or more proteins, each protein may be referred to as a “monomer” or as a “subunit; and the biologically functional molecule may be referred to as a “complex.”

[0133] By “residue” as used herein is meant a position in a protein and its associated amino acid identity. For example, Asparagine 297 (also referred to as Asn297 or N297) is a residue at position 297 in the human antibody IgG1.

[0134] By “IgG subclass modification” or “isotype modification” as used herein is meant an amino acid modification that converts one amino acid of one IgG isotype to the corresponding amino acid in a different, aligned IgG isotype. For example, because IgG1 comprises a tyrosine and IgG2 a phenylalanine at EU position 296, a F296Y substitution in IgG2 is considered an IgG subclass modification.

[0135] By “non-naturally occurring modification” as used herein with respect to an IgG domain is meant an amino acid modification that is not isotypic. For example, because none of the IgGs comprise a serine at position 434, the substitution 434S in IgG1, IgG2, IgG3, or IgG4 (or hybrids thereof) is considered a non-naturally occurring modification.

[0136] By “amino acid” and “amino acid identity” as used herein is meant one of the 20 naturally occurring amino acids that are coded for by DNA and RNA.

[0137] By “effector function” as used herein is meant a biochemical event that results from the interaction of an antibody Fc region with an Fc receptor or ligand. Effector functions include but are not limited to ADCC, ADCP, and CDC.

[0138] By “IgG Fc ligand” or “Fc ligand” as used herein is meant a molecule, preferably a polypeptide, from any organism that binds to the Fc region of an IgG antibody to form an Fc/Fc ligand complex. Fc ligands include but are not limited to FcγRIs, FeyRIIs, FeyRIIIs, FcRn, C1q, C3, mannan binding lectin, mannose receptor, staphylococcal protein A, streptococcal protein G, and viral FcγR. Fc ligands also include Fc receptor homologs (FcRH), which are a family of Fc receptors that are homologous to the FcγRs (Davis et al., 2002, Immunological Reviews 190:123-136, entirely incorporated by reference). Fc ligands may include undiscovered molecules that bind Fc. Particular IgG Fc ligands are FcRn and Fc gamma receptors.

[0139] By “Fc gamma receptor”, “FcγR” or “FcgammaR” as used herein is meant any member of the family of proteins that bind the IgG antibody Fc region and is encoded by an FcγR gene. In humans this family includes but is not limited to FcγRI (CD64), including isoforms FcγRIa, FcγRIb, and FcγRIc; FcγRII (CD32), including isoforms FcγRIIa (including allotypes H131 and R131), FcγRIIb (including FcγRIIb-1 and FcγRIIb-2), and FcγRIIc; and FcγRIII (CD16), including isoforms FcγRIIIa (including allotypes V158 and F158) and FcγRlllb (including allotypes FcγRIIb-NA1 and FcγRIIb-NA2) (Jefferis et al., 2002, Immunol Lett 82:57-65, entirely incorporated by reference), as well as any undiscovered human FcγRs or FcγR isoforms or allotypes. An FcγR may be from any organism, including but not limited to humans, mice, rats, rabbits, and monkeys. Mouse FcγRs include but are not limited to FcγRI (CD64), FcγRII (CD32), FcγRIII (CD16), and FcγRIII-2 (CD16-2), as well as any undiscovered mouse FcγRs or FcγR isoforms or allotypes.

[0140] By “FcRn” or “neonatal Fc receptor” as used herein is meant a protein that binds the IgG antibody Fc region and is encoded at least in part by an FcRn gene. The FcRn may be from any organism, including but not limited to humans, mice, rats, rabbits, and monkeys. As is known in the art, the functional FcRn protein comprises two polypeptides, often referred to as the heavy chain and light chain. The light chain is beta-2-microglobulin (B2-microglobulin) and the heavy chain is encoded by the FcRn gene. Unless otherwise noted herein, FcRn or an FcRn protein refers to the complex of FcRn heavy chain with B2-microglobulin. A variety of Fc variants can be used to increase binding to the FcRn, and in some cases, to increase serum half-life. In general, unless otherwise noted, the Fc monomers of the invention retain binding to the FcRn (and, as noted below, can include amino acid variants to increase binding to the FcRn).

[0141] By “parent polypeptide” as used herein is meant a starting polypeptide that is subsequently modified to generate a variant. The parent polypeptide may be a naturally occurring polypeptide (i.e., a wildtype polypeptide), or a variant or engineered version of a naturally occurring polypeptide. Parent polypeptide may refer to the polypeptide itself, compositions that comprise the parent polypeptide, or the amino acid sequence that encodes it.

[0142] By “Fc” or “Fc region” or “Fc domain” as used herein is meant the polypeptide comprising the constant region of an antibody, in some instances, excluding all of the first constant region immunoglobulin domain (e.g., CH1) or a portion thereof, and in some cases, optionally including all or part of the hinge. For IgG, the Fc domain comprises immunoglobulin domains CH2 and CH3 (Cy2 and Cy3), and optionally all or a portion of the hinge region between CH1 (Cγ1) and CH2 (Cy2). Thus, in some cases, the Fc domain includes, from N- to C-terminus, CH2-CH3 and hinge-CH2-CH3. In some embodiments, the Fc domain is that from IgG1, IgG2, IgG3 or IgG4, with IgG1 hinge-CH2-CH3 and IgG4 hinge-CH2-CH3 finding particular use in many embodiments. Additionally, in certain embodiments, wherein the Fc domain is a human IgG1 Fc domain, the hinge includes a C220S amino acid substitution. Furthermore, in some embodiments where the Fc domain is a human IgG4 Fc domain, the hinge includes a S228P amino acid substitution. Although the boundaries of the Fc region may vary, the human IgG heavy chain Fc region is usually defined to include residues E216, C226, or A231 to its carboxyl-terminus, wherein the numbering is according to the EU index as in Kabat. In some embodiments, as is more fully described below, amino acid modifications are made to the Fc region, for example to alter binding to one or more FcγR or to the FcRn.

[0143] As will be appreciated by those in the art, the exact numbering and placement of the heavy constant region domains can be different among different numbering systems. A useful comparison of heavy constant region numbering according to EU and Kabat is as below, see Edelman et al., 1969, Proc Natl Acad Sci USA 63:78-85 and Kabat et al., 1991, Sequences of Proteins of Immunological Interest, 5th Ed., United States Public Health Service, National Institutes of Health, Bethesda, entirely incorporated by reference.

TABLE 1

| | EU Numbering | Kabat Numbering |
|---|---|---|
| CH1 | 118-215 | 114-223 |
| Hinge | 216-230 | 226-243 |
| CH2 | 231-340 | 244-360 |
| CH3 | 341-447 | 361-478 |

[0144] “Fc variant” or “variant Fc” as used herein is meant a protein comprising an amino acid modification in an Fc domain. The modification can be an addition, deletion, or substitution. The Fc variants of the present invention are defined according to the amino acid modifications that compose them. Thus, for example, N434S or 434S is an Fc variant with the substitution for serine at position 434 relative to the parent Fc polypeptide, wherein the numbering is according to the EU index. Likewise, M428L/N434S defines an Fc variant with the substitutions M428L and N434S relative to the parent Fc polypeptide. The identity of the WT amino acid may be unspecified, in which case the aforementioned variant is referred to as 428L/434S. It is noted that the order in which substitutions are provided is arbitrary, that is to say that, for example, 428L/434S is the same Fc variant as 434S/428L, and so on. For all positions discussed herein that relate to antibodies or derivatives and fragments thereof (e.g., Fc domains), unless otherwise noted, amino acid position numbering is according to the EU index. The “EU index” or “EU index as in Kabat” or “EU numbering” scheme refers to the numbering of the EU antibody (Edelman et al., 1969, Proc Natl Acad Sci USA 63:78-85, hereby entirely incorporated by reference). The modification can be an addition, deletion, or substitution.

[0145] By “fusion protein” as used herein is meant covalent joining of at least two proteins or protein domains. Fusion proteins may comprise artificial sequences, e.g. a domain linker, an Fc domain (e.g., a variant Fc domain), an IL-7 (e.g., a variant IL18), etc. as described herein. By “Fc fusion protein” or “immunoadhesin” herein is meant a protein comprising an Fc region, generally linked (optionally through a domain linker, as described herein) to one or more different protein domains. Accordingly, an “IL18-Fc fusion” includes an Fc domain linked (optionally through a domain linker) to an IL18, as described herein. In some instances, two Fc fusion proteins can form a homodimeric Fc fusion protein or a heterodimeric Fc fusion protein. In some embodiments, one monomer of the heterodimeric IL18-Fc fusion protein includes an Fc domain alone (e.g., an “empty Fc domain”) and the other monomer is an Fc fusion, comprising an IL18, as outlined herein. In other embodiments, both the first and second monomers are Fc fusion proteins that include an Fc domain and an IL18.

[0146] By “position” as used herein is meant a location in the sequence of a protein. Positions may be numbered sequentially, or according to an established format, for example the EU index for numbering of antibody domains (e.g., a CH1, CH2, CH3 or hinge domain).

[0147] By “strandedness” in the context of the monomers of the heterodimeric proteins of the invention herein is meant that, similar to the two strands of DNA that “match”, heterodimerization variants are incorporated into each monomer so as to preserve, create, and/or enhance the ability to “match” to form heterodimers. For example, if some pI variants are engineered into monomer A (e.g. making the pI higher), then steric variants that are “charge pairs” that can be utilized as well do not interfere with the pI variants, e.g. the charge variants that make a pI higher are put on the same “strand” or “monomer” to preserve both functionalities. Similarly, for “skew” variants that come in pairs of a set as more fully outlined below, the skilled artisan will consider pI in deciding into which strand or monomer that incorporates one set of the pair will go, such that pI separation is maximized using the pI of the skews as well.

[0148] By “wild type,” “wildtype” or WT″ herein is meant an amino acid sequence or a nucleotide sequence that is found in nature, including allelic variations. A WT protein has an amino acid sequence or a nucleotide sequence that has not been intentionally modified.

[0149] The IL18-Fc fusion proteins and variant IL18s provided herein are generally isolated or recombinant. “Isolated,” when used to describe the various polypeptides disclosed herein, means a polypeptide that has been identified and separated and/or recovered from a cell or cell culture from which it was expressed. Ordinarily, an isolated polypeptide will be prepared by at least one purification step. An “isolated protein,” refers to a protein which is substantially free of other proteins from a cell culture such as host cell proteins. “Recombinant” means the proteins are generated using recombinant nucleic acid techniques in exogeneous host cells.

[0150] “Percent (%) amino acid sequence identity” with respect to a protein sequence is defined as the percentage of amino acid residues in a candidate sequence that are identical with the amino acid residues in the specific (parental) sequence, after aligning the sequences and introducing gaps, if necessary, to achieve the maximum percent sequence identity, and not considering any conservative substitutions as part of the sequence identity. Alignment for purposes of determining percent amino acid sequence identity can be achieved in various ways that are within the skill in the art, for instance, using publicly available computer software such as BLAST, BLAST-2, ALIGN or Megalign (DNASTAR) software. Those skilled in the art can determine appropriate parameters for measuring alignment, including any algorithms needed to achieve maximal alignment over the full length of the sequences being compared. One particular program is the ALIGN-2 program outlined at paragraphs [0279] to [0280] of US Publ. App. No. 20160244525, hereby incorporated by reference.

[0151] The degree of identity between an amino acid sequence provided herein (“invention sequence”) and the parental amino acid sequence is calculated as the number of exact matches in an alignment of the two sequences, divided by the length of the “invention sequence,” or the length of the parental sequence, whichever is the shortest. The result is expressed in percent identity.

[0152] In some embodiments, two or more amino acid sequences are at least 50%, 60%, 70%, 80%, or 90% identical. In some embodiments, two or more amino acid sequences are at least 95%, 97%, 98%, 99%, or even 100% identical.

[0153] By “fused” or “covalently linked” is herein meant that the components (e.g., an IL18 and an Fc domain) are linked by peptide bonds, either directly or indirectly via domain linkers, outlined herein.

[0154] The strength, or affinity, of specific binding can be expressed in terms of dissociation constant (KD) of the interaction, wherein a smaller KD represents greater affinity and a larger KD represents lower affinity. Binding properties can be determined by methods well known in the art such as bio-layer interferometry and surface plasmon resonance based methods. One such method entails measuring the rates of antigen-binding site/antigen or receptor/ligand complex association and dissociation, wherein rates depend on the concentration of the complex partners, the affinity of the interaction, and geometric parameters that equally influence the rate in both directions. Thus, both the association rate (ka) and the dissociation rate (kd) can be determined, and the ratio of kd/ka is equal to the dissociation constant KD (See Nature 361:186-187 (1993) and Davies et al. (1990) Annual Rev Biochem 59:439-473).

[0155] Specific binding for a particular molecule or an epitope can be exhibited, for example, by a molecule (e.g., IL18) having a KD for its binding partner (e.g., IL18 receptor) of at least about 10-4 M, at least about 10-5 M, at least about 10-6 M, at least about 10-7 M, at least about 10-8 M, at least about 10-9 M, alternatively at least about 10-10 M, at least about 10-11 M, at least about 10-12 M, or greater. Typically, an antigen binding molecule that specifically binds an antigen will have a KD that is 20-, 50-, 100-, 500-, 1000-, 5,000-, 10,000- or more times greater for a control molecule relative to the antigen or epitope.

[0156] III. IL18 Fc Fusion Proteins

[0157] In some aspects, provided herein are IL18-Fc fusion proteins that include a first monomer that includes a IL18 protein (e.g., wildtype IL18 or a variant thereof) and a first Fc domain comprising pI variants as described below and a second monomer that includes a second Fc domain. The IL18-Fc fusion proteins are based on the self-assembling nature of the two Fc domains on each monomer leading to a IL18-Fc fusion proteins. Heterodimeric IL18-Fc fusion are made by altering the amino acid sequence of each monomer as more fully discussed below.

[0158] In one aspect, the IL18-Fc fusion protein is a heterodimeric Fc fusion protein. Such heterodimeric IL18-Fc fusion protein include a first monomer and a second monomer, each having an Fc domain with different amino acid sequences (e.g., a monovalent IL18-Fc fusion protein). As will be appreciated, discussion herein of components of the IL18-Fc fusion proteins encompassed by the present disclosure is applicable to both homodimeric and heterodimeric Fc fusion proteins as appropriate, unless otherwise specified.

[0159] In some embodiments, the IL18-Fc fusion protein is a monovalent IL18 fusion (i.e., includes only one IL18). In such embodiments, the first monomer includes an Fc domain and an IL18 and the second monomer includes an Fc domain alone (i.e., no IL18, an “empty Fc domain,”).

[0160] The Fc domains can be derived from IgG Fc domains, e.g., IgG1, IgG2, IgG3 or IgG4 Fc domains, with IgG1 Fc domains finding particular use in the invention. As described herein, IgG1 Fc domains may be used, often, but not always in conjunction with ablation variants to ablate effector function. Similarly, when low effector function is desired, IgG4 Fc domains may be used.

[0161] For any of the dimeric IL18-Fc fusion proteins described herein, the carboxy-terminal portion of each chain defines a constant region primarily responsible for effector function. Kabat et al. collected numerous primary sequences of the variable regions of heavy chains and light chains. Based on the degree of conservation of the sequences, they classified individual primary sequences into the CDRs and the framework and made a list thereof (see SEQUENCES OF IMMUNOLOGICAL INTEREST, 5th edition, NIH publication, No. 91-3242, E.A. Kabat et al., entirely incorporated by reference). Throughout the present specification, the Kabat numbering system is generally used when referring to a residue in the variable domain (approximately, residues 1-107 of the light chain variable region and residues 1-113 of the heavy chain variable region) and the EU numbering system for Fc regions (e.g., Kabat et al., supra (1991)).

[0162] In the IgG subclass of immunoglobulins, there are several immunoglobulin domains in the heavy chain. By “immunoglobulin (Ig) domain” herein is meant a region of an immunoglobulin having a distinct tertiary structure. Of interest in the present IL18 Fc fusion proteins are the heavy chain domains, including, the constant heavy (CH) domains and the hinge domains. In the context of IgG antibodies, the IgG isotypes each have three CH regions. Accordingly, “CH” domains in the context of IgG are as follows: “CH1” refers to positions 118-215 according to the EU index as in Kabat. “Hinge” refers to positions 216-230 according to the EU index as in Kabat. “CH2” refers to positions 231-340 according to the EU index as in Kabat, and “CH3” refers to positions 341-447 according to the EU index as in Kabat. As shown in Table 1, the exact numbering and placement of the heavy chain domains can be different among different numbering systems. As shown herein and described below, the pI variants can be in one or more of the CH regions, as well as the hinge region, discussed below.

[0163] By “hinge” or “hinge region” or “antibody hinge region” or “immunoglobulin hinge region” herein is meant the flexible polypeptide comprising the amino acids between the first and second heavy chain constant domains of an antibody. Structurally, the IgG CH1 domain ends at EU position 215, and the IgG CH2 domain begins at residue EU position 231. Thus for IgG the antibody hinge is herein defined to include positions 216 (E216 in IgG1) to 230 (P230 in IgG1), wherein the numbering is according to the EU index as in Kabat. In some embodiments, for example in the context of an Fc region, the hinge (full length or a fragment of the hinge) is included, generally referring to positions 216-230. As noted herein, pI variants can be made in the hinge region as well.

[0164] In some embodiments of the IL18 fusion proteins described herein, each of the first and second monomers include an Fc domain that has the formula hinge-CH2-CH3. In some embodiments of the IL18 fusion proteins described herein, each of the first and second monomers include an Fc domain that has the formula CH2-CH3.

[0165] In some embodiments, provided herein is an IL18-Fc fusion protein which is also referred to as “an IL18 x Fab-Fc fusion protein”. Such an IL18 x Fab-Fc fusion protein includes a first monomer containing a variable heavy chain and an Fc domain; a second monomer containing and an IL18 protein (e.g., a wildtype IL18 protein or a variant thereof) and an Fc domain comprising pI variants as described below, and a third monomer containing a variable light chain such that the variable heavy and light chains form a Fab. In certain embodiments, the IL18 is directly connected to the Fc domain. In some embodiments, the C-terminus of the IL18 is directly connected to the N-terminus of the Fc domain. In some embodiments described herein, the IL18 x Fab-Fc fusion protein also includes a second monomer that includes a second Fc domain and a Fab. In certain embodiments, the Fab is directly connected to the second Fc domain. In certain embodiments, the Fab is connected to the second Fc domain via a linker, such as but not limited to a domain linker. In some embodiments, the heavy chain of the Fab is directly connected to the second Fc domain. In some embodiments, the heavy chain of the Fab is connected to the second Fc domain via a linker, such as but not limited to a domain linker. In some embodiments, the C-terminus of the heavy chain of the Fab is directly connected to the N-terminus of the second Fc domain. In some embodiments, the light chain of the Fab is not directed connected to the second monomer. In certain embodiments, the light chain of the Fab is not directed connected to the first monomer.

[0166] In certain embodiments, the IL18 is connected to the Fc domain by a linker. In certain embodiments, the linker is a domain linker. Useful domain linker include, but are not limited to, those disclosed in FIG. 8. While any suitable linker can be used, many embodiments utilize a glycine-serine polymer, including for example (GS)n [SEQ ID NO:777], (GSGGS)n [SEQ ID NO:778], (GGGGS)n, and (GGGS)n [SEQ ID NO:779], where n is an integer of at least one (and generally from 0 to 1 to 2 to 3 to 4 to 5) as well as any peptide sequence that allows for recombinant attachment of the two domains with sufficient length and flexibility to allow each domain to retain its biological function. In some cases, and with attention being paid to “strandedness”, as outlined below, the linker is a charged domain linker.

[0167] In certain embodiments, the IL18 fusion protein includes a first monomer, wherein an IL18 is connected to the Fc domain by a domain linker. In some embodiments, the C-terminus of the IL18 is connected to the N-terminus of the Fc domain by a domain linker.

[0168] IV. Interleukin 18 Variants

[0169] The IL18-Fc fusion proteins provided herein include an IL18 protein. In some embodiments, the IL18-Fc fusion protein is a monovalent IL18-Fc fusion protein that includes one IL18. The IL18s that can be used with the IL18-Fc fusion proteins provided herein include wildtype IL18 (see FIGS. 1-3), functional fragments of such IL18s and variants that include 1, 2, 3, 4, 5, 6, 7, 8, 9, 10 amino acid modifications as compared to wildtype IL-18 (e.g., wildtype human IL18 and wildtype human IL18, mature form).

[0170] In some embodiments, the IL18 is a variant human IL18 that is at least 90, 91, 92, 93, 94, 95, 96, 97, 98, 99% identical to human IL18. In some embodiments, the IL18 is a variant human IL18 that is at least 90, 91, 92, 93, 94, 95, 96, 97, 98, 99% identical to human IL18, mature form. In particular embodiments, the IL18 includes 1, 2, 3, 4, 5, 6, 7, 8, 9, 10, 11, 12, 13, 14, 15, 16, 17, 18, 19 or 20 modifications as compared to wildtype human IL18. In particular embodiments, the IL18 includes 1, 2, 3, 4, 5, 6, 7, 8, 9, 10, 11, 12, 13, 14, 15, 16, 17, 18, 19 or 20 modifications as compared to wildtype human IL18.

[0171] Numbering of such IL18 modifications described herein are based on the human IL18 mature form sequence in FIG. 1, wherein the first amino acid of the sequence (“Y”) is amino acid position 1. Provided herein are compositions that include such a variant IL18 having one or more amino acid substitutions that reduce heterogeneity that may affect IL18-Fc fusion protein production and/or activity.

[0172] In certain embodiments, the IL18 variant includes one or more modifications to improve production. Such modifications are intended to improve yield and/or decrease molecular heterogeneity. Residues which may be modified to improve production include E31, C38, C68, C76, C127, D157. In some embodiments, the production variants include one or more amino acid substitutions selected from E31Q, C38S, C68S, C76S, C127S, D157del, D157S, and D157A.

[0173] In certain embodiments, the IL18 variant includes one or more modifications that are affinity variants which modulate binding affinity for IL18 receptors (such as IL18R1, IL18RAP, or the IL18R1:IL18RAP complex) and/or IL18BP. In some embodiments, the IL18 variant possesses one or more modifications that modulate IL18 potency and/or IL18 sink. Such modifications are believed to decrease the IL18BP sink and extend the half-life of the subject IL18-Fc fusion protein. Residues which may be modified to reduce binding affinity for IL18BP, IL18R1, IL18RAP, and/or the IL18R1:IL18RAP complex include Y1, E6, K8, D17, E31, D35, S36, D37, D40, N41, M51, K53, S55, Q56, P57, M60, Q103, H109, D110, N111, and D132. In some embodiments, the affinity variants include one or more amino acid substitutions selected from Y1F, Y1H, E6A, E6Q, K8Y, K8Q, K8E, D17N, E31Q, D35N, D35E, S36D, S36N, D37N, D40N, N41Q, M51K, M51Q, M51I, M51R, M51L, M51H, M51F, M51Y, K53A, K53S, K53G, K53T, K53I, K53L, K53N, K53D, K53R, K53H, K53M, K53E, K53Q, K53V, K53Y, K53F, S55N, S55Q, S55D, S55E, S55T, Q56L, Q56I, P57A, P57E, P57Q, P57D, P57Y, P57N, M60L, M60I, M60K, M60Y, M60F, Q103E, H109W, H109Y, D110N, D110Q, D110R, N111Q, N111S, N111T, N111E, D132Q, and D132E. In some embodiments, the amino acid substitution can include E6A/K53A, D35N/K53A, N41Q/K53A, D35N/N41Q/K53A, D35N/N41Q, D37N/K53A, E6Q/K53D, E6Q/M51K/K53D, M51K/K53D, M51K/K53E, E6Q/K53E, E6Q/M51K/K53E, E6Q/M51K/P57E, M51K/P57E, E6Q/P57E, K53G/P57E, K53T/P57E, K53A/P57E, M51L/K53D, K53D/D110R, K53D/N111T, K53D/S55T, K53D/S55T/D110R, M51L/K53D/S55T/D110R/N111T, M51L/K53D/S55T/D110R, K53D/S55T/D110R/N111T, K53D/S55T/N111T, D35N/D37N, E6Q/M51L/K53D/S55T/D110R/N111T, K53D/H109Y, D37N/K53D, D35N/K53D, K8E/K53D, N41Q/K53D, K53D/P57V, K53D/P57T, or E6Q/K53D/N111T. In certain embodiments, the IL18 variant includes one or more modifications that modulate binding to IL18R including K53V. In certain other embodiments, the IL18 variant includes one or more modification that modulate binding to IL18BP including M60K.

[0174] In certain embodiments, the IL18 variant includes one or more modifications to improve stability. In some embodiments, the IL18 variant possesses one or more modifications that improve stability in the context of cysteine engineering (such as by removing unpaired cysteines and/or introducing new disulfide bridges). Residues which may be modified to improve stability include S7, S10, V11, N14, L15, Q18, D23, R27, P28, L29, E31, M33, T34, C38, R39, R44, I46, I49, S50, K53, D54, Q56, P57, M60, A61, V62, T63, S65, K67, C68, E69, I71, C76, E77, I80, I81, N87, P88, D90, K93, T95, K96, S97, Q103, N111, M113, S119, A126, C127, L136, L138, K139, E141, L144, D146, R147, I149, M150, N155, E156, and D157. In some embodiments, the stability variants include one or more amino acid substitutions selected from S7C, S7P, S10C, V11I, N14C, N14W, L15C, Q18L, D23N, D23S, R27Q, P28C, L29V, E31Q, M33C, T34P, C38Q, C38R, C38E, C38L, C38I, C38V, C38K, C38D, C38S, R39T, R39S, R44Q, I46V, I49C, S50C, S50Y, K53N, D54C, Q56L, P57T, P57V, P57A, P57E, M60L, A61C, V62C, T63C, S65C, K67Q, C68I, C68F, C68Y, C68D, C68N, C68E, C68Q, C68K, C68S, E69K, I71M, C76E, C76K, C76S, E77K, 180T, I81V, I81L, N87S, P88C, D90E, K93D, K93N, T95E, K96G, K96Q, S97N, Q103C, Q103L, Q103I, N111D, M113I, S119L, A126C, C127W, C127Y, C127F, C127D, C127E, C127K, C127S, L136C, L138C, K139C, E141K, E141Q, L144N, D146Y, D146L, D146F, R147C, R147K, I149V, M150F, M150T, N155C, E156Q, and D157N. In some embodiments, the amino acid substitution can include Q56L/P57T, K93D/T95E, K93N/T95E, E156Q/D157N, D23N/R27Q, Q56L/T95E, K96Q/S119L, E141K/I149V, E141Q/I149V, S7P/S50Y, 180T/I81L, P57A/S119L, P57A/180T/I81L/S119L, P57A/K93D/T95E/S119L, I80T/S119L, 180T/I81L/K93D/T95E, P57A/180T/I81L/K93D/T95E/S119L, P57A/180T/S119L, N14C/S127C, M33C/S38C, S76C/L138C, S10C/I49C, Ll5C/R147C, P28C/L136C, S50C/P88C, T63C/P88C, V62C/Q103C, S10C/N155C, S65C/P88C, S7C/S50C, D54C/A61C, A126C/K139C, or C38R/C127W.

[0175] In some embodiments, one or more residues of IL18 selected from Y1, E6, S7, K8, S10, V11, N14, L15, D17, Q18, D23, R27, P28, L29, E31, M33, T34, D35, S36, D37, C38, R39, D40, N41, R44, I46, I49, S50, M51, K53, D54, S55, Q56, P57, M60, A61, V62, T63, S65, K67, C68, E69, I71, C76, E77, I80, I81, N87, P88, D90, K93, T95, K96, S97, Q103, H109, D110, N111, M113, S119, A126, C127, D132, L136, L138, K139, E141, L144, D146, R147, I149, M150, N155, E156, and D157 are modified. In some embodiments, the IL18 variant described herein includes one or more amino acid substitutions selected from Y1F, Y1H, E6A, E6Q, S7C, S7P, K8E, K8Q, K8Y, S10C, V11I, N14C, N14W, L15C, D17N, Q18L, D23N, D23S, R27Q, P28C, L29V, E31Q, M33C, T34P, D35N, D35E, S36D, S36N, D37N, C38S, C38Q, C38R, C38E, C38L, C38I, C38V, C38K, C38D, R39S, R39T, D40N, N41Q, R44Q, I46V, I49C, S50C, S50Y, M51I, M51K, M51Q, M51R, M51L, M51H, M51F, M51Y, K53A, K53D, K53E, K53G, K53H, K53I, K53L, K53M, K53N, K53Q, K53R, K53S, K53T, K53V, K53Y, K53F, D54C, S55N, S55Q, S55D, S55E, S55T, Q56I, Q56L, P57A, P57E, P57T, P57V, P57Q, P57D, P57Y, P57N, M60I, M60L, M60K, M60Y, M60F, A61C, V62C, T63C, S65C, K67Q, C68S, C68I, C68F, C68Y, C68D, C68N, C68E, C68Q, C68K, E69K, I71M, C76S, C76E, C76K, E77K, 180T, I81L, I81V, N87S, P88C, D90E, K93D, K93N, T95E, K96G, K96Q, S97N, Q103C, Q103E, Q103I, Q103L, H109W, H109Y, D110N, D110Q, D110R, N111D, N111Q, N111S, N111T, N111E, M113I, S119L, A126C, C127S, C127W, C127Y, C127F, C127D, C127E, C127K, D132Q, D132E, L136C, L138C, K139C, E141K, E141Q, L144N, D146F, D146L, D146Y, R147C, R147K, I149V, M150F, M150T, N155C, E156Q, D157A, D157S, D157N, and D157del. In some embodiments, the IL18 variant includes a 4CS substitution (C38S/C68S/C76S/C127S substitutions) and one or more of the additional substitutions including S38C, S38E, S38L, S38Q, S38R, S38V, S38K, S38D, S68C, S68D, S68E, S68F, S68I, S68N, S68Q, S68Y, S68K, S76C, S76E, S76K, S127C, S127D, S127F, S127W, S127K, and S127Y. In some embodiments, the amino acid substitution can include 4CS, 4CS/D193S, 4CS/D193A, 4CS/delD193, 4CS/S38E, 4CS/S68E, 4CS/S76E, 4CS/S127E, 4CS/S38K, 4CS/S68K, 4CS/S76K, 4CS/S127K, 4CS/S38D, 4CS/Y1F, 4CS/Y1H, 4CS/E6A, 4CS/E6Q, 4CS/D17N, 4CS/E31Q, 4CS/D35N, 4CS/D37N, 4CS/D40N, 4CS/N41Q, 4CS/K53R, 4CS/K53H, 4CS/K53M, 4CS/K53E, 4CS/K53Q, 4CS/K53A, 4CS/Q103E, 4CS/D110N, 4CS/N111Q, 4CS/E6A/K53A, 4CS/N14C/E31Q/S127C, 4CS/E31Q/K53A, 4CS/E31Q/D35N/K53A, 4C S/E31Q/N41Q/K53A, 4CS/E31Q/D35N/N41Q/K53A, 4CS/E31Q/D35N, 4CS/E31Q/N41Q, 4CS/E31Q/D35N/N41Q, 4CS/E31Q/D37N, 4CS/E31Q/D37N/K53A, 4C S/E31Q/M33C/S38C, 4CS/E31Q/S76C/L138C, 4CS/E31Q/S68I, 4CS/E31Q/S68F, 4CS/E31Q/S127W, 4C S/E31Q/S127Y, 4CS/E31Q/S127F, 4CS/S10C/E31Q/149C, 4C S/L15C/E31Q/R147C, 4C S/P28C/E31Q/L136C, 4CS/E31Q/S50C/P88C, 4CS/E31Q/T63C/P88C, 4C S/E31Q/V62C/Q103C, 4C5/510C/E31Q/N155C, 4CS/E31Q/S65C/P88C, 4CS/S7C/E31Q/S50C, 4CS/E31Q/D54C/A61C, 4C S/E31Q/A126C/K139C, 4CS/N14W/E31Q, 4CS/E31Q/D146Y, 4CS/E31Q/D146L, 4C S/E31Q/D146F, 4C S/E31Q/Q103L, 4CS/E31Q/Q103I, 4CS/E31Q/M150F, 4CS/Q18L/E31Q, 4CS/E31Q/S68Y, 4CS/E31Q/S38Q, 4C S/E31Q/S38R, 4CS/E31Q/S68D, 4CS/S7P/E31Q, 4CS/V11I/E31Q, 4CS/D23N/E31Q, 4CS/D23S/E31Q, 4CS/R27Q/E31Q, 4CS/L29V/E31Q, 4CS/E31Q/T34P, 4CS/E31Q/R39T, 4CS/E31Q/R39S, 4CS/E31Q/R44Q, 4CS/E31Q/I46V, 4CS/E31Q/S50Y, 4CS/E31Q/Q56L, 4CS/E31Q/Q56L/P57T, 4C S/E31Q/P57T, 4CS/E31Q/P57V, 4CS/E31Q/M60L, 4CS/E31Q/K67Q, 4CS/E31Q/E69K, 4CS/E31Q/I71M, 4CS/E31Q/E77K, 4CS/E31Q/I80T, 4CS/E31Q/I81V, 4CS/E31Q/I81L, 4C S/E31Q/N87S, 4C S/E31Q/D90E, 4CS/E31Q/K93D/T95E, 4CS/E31Q/K93N/T95E, 4CS/E31Q/T95E, 4CS/E31Q/K96G, 4CS/E31Q/S97N, 4CS/E31Q/N111D, 4CS/E31Q/M113I, 4CS/E31Q/S119L, 4CS/E31Q/L144N, 4CS/E31Q/R147K, 4CS/E31Q/I149V, 4CS/E31Q/M150T, 4CS/E31Q/E156Q/D157N, 4CS/K53S, 4CS/K53G, 4CS/K53T, 4CS/K53I, 4CS/K53L, 4CS/K53N, 4CS/K53D, 4CS/M51K, 4CS/M51Q, 4CS/M51I, 4CS/S55N, 4CS/S55Q, 4CS/Q56L, 4CS/Q56I, 4CS/P57A, 4CS/P57E, 4CS/M60L, 4CS/M60I, 4CS/K8Y, 4CS/K8Q, 4CS/K8E, 4CS/H109W, 4CS/H109Y, 4CS/E31Q/S38E, 4CS/E31Q/S38L, 4CS/E31Q/S38I, 4C S/E31Q/S38V, 4C S/E31Q/S68N, 4CS/E31Q/S68E, 4CS/E31Q/S68Q, 4C S/E31Q/S76C, 4C S/E31Q/S127D, 4CS/E31Q/S127E, 4CS/D23N/E31Q/R27Q, 4CS/E31Q/Q56L/T95E, 4CS/E31Q/K96Q/S119L, 4CS/E31Q/E141K/I149V, 4CS/E31Q/E141Q/I149V, 4CS/S7P/E31Q/S50Y, 4CS/E31Q/I80T/I81L/delD193, 4CS/E31Q/P57A/S119L/delD193, 4CS/E31Q/P57A/I80T/I81L/S119L/delD193, 4CS/E31Q/P57A/K93D/T95E/S119L/delD193, 4CS/E31Q/I80T/S119L/delD193, 4CS/E31Q/I80T/I81L/K93D/T95E/delD193, 4CS/E31Q/P57A/I80T/I81L/K93D/T95E/S119L/delD193, 4CS/S7C/E31Q/S50C/delD193, 4CS/S7C/E31Q/S50C/P57A/delD193, 4CS/S7C/E31Q/S50C/S119L/delD193, 4CS/S7C/E31Q/S50C/I80T/delD193, 4CS/S7C/E31Q/S50C/I80T/S119L/delD193, 4CS/S7C/E31Q/S50C/P57A/I80T/S119L/delD193, 4CS/S10C/E31Q/N155C/delD193, 4CS/S10C/E31Q/P57A/N155C/delD193, 4CS/S10C/E31Q/S119L/N155C/delD193, 4CS/S10C/E31Q/I80T/N155C/delD193, 4C S/S10C/E31Q/I80T/S119L/N155C/delD193, 4CS/S10C/E31Q/P57A/I80T/S119L/N155C/delD193, 4C S/S10C/E31Q/I49C/delD193, 4CS/L15C/E31Q/R147C/delD193, 4CS/E31Q/T63C/P88C/delD193, 4CS/N14C/E31Q/S127C/delD193, 4CS/E31Q/S38R/S127W/delD193, 4CS/S10C/D35E/N155C, 4CS/S10C/S36D/N155C, 4CS/S10C/S36N/N155C, 4CS/S10C/K53V/N155C, 4CS/S10C/K53Y/N155C, 4CS/S10C/K53F/N155C, 4CS/S10C/M51R/N155C, 4CS/S10C/M51L/N155C, 4C S/S10C/M51H/N155C, 4C S/S10C/M51F/N155C, 4CS/S10C/M51Y/N155C, 4CS/S10C/S55D/N155C, 4CS/S10C/S55E/N155C, 4CS/S10C/S55T/N155C, 4CS/S10C/P57Q/N155C, 4CS/S10C/P57D/N155C, 4CS/S10C/P57Y/N155C, 4CS/S10C/P57N/N155C, 4CS/S10C/M60Y/N155C, 4CS/S10C/M60F/N155C, 4CS/S10C/D110Q/N155C, 4CS/S10C/D110R/N155C, 4CS/S10C/N111D/N155C, 4CS/S10C/N111S/N155C, 4CS/S10C/N111T/N155C, 4CS/S10C/N111E/N155C, 4CS/S10C/D132Q/N155C, 4CS/S10C/D132EN155C, 4CS/E6Q/S10C/K53D/N155C, 4CS/E6Q/S10C/M51K/K53D/N155C, 4CS/S10C/E31Q/D35N/N41Q/K53A/N155C, 4CS/S10C/E31Q/N41Q/K53A/N155C, 4CS/S10C/E31Q/K53A/N155C, 4CS/S10C/K53T/N155C, 4CS/S10C/P57A/N155C, 4CS/S10C/N155C, 4CS/S10C/S76G/N155C, 4CS/S10C/S76A/N155C, 4CS/S10C/M51K/K53D/N155C, 4CS/S10C/M51K/K53E/N155C, 4CS/E6Q/S10C/K53E/N155C, 4CS/E6Q/S10C/M51K/K53E/N155C, 4CS/E6Q/S10C/M51K/P57E/N155C, 4CS/S10C/M51K/P57E/N155C, 4CS/E6Q/S10C/P57E/N155C, 4CS/S10C/E31Q/K53T/N155C, 4CS/S10C/K53G/P57E/N155C, 4CS/S10C/K53T/P57E/N155C, 4CS/S10C/K53A/P57E/N155C, 4CS/S10C/P57E/N155C, 4CS/S10C/K53D/N155C, 4CS/S10C/E31Q/N41Q/N155C, 4CS/S10C/K53A/N155C, 4CS/S10C/K53G/N155C, 4CS/S10C/K53E/N155C, 4CS/S10C/K53S/N155C, 4CS/S10C/M51L/K53D/N155C, 4CS/S10C/K53D/D110R/N155C, 4CS/S10C/K53D/N111T/N155C, 4CS/S10C/K53D/S55T/N155C, 4CS/S10C/K53D/S55T/D110R/N155C, 4CS/S10C/M51L/K53D/S55T/D110R/N111T/N155C, 4CS/S10C/M51L/K53D/S55T/D110R/N155C, 4CS/S10C/K53D/S55T/D110R/N111T/N155C, 4CS/S10C/K53D/S55T/N111T/N155C, 4CS/S10C/E31Q/D35N/N155C, 4CS/S10C/N41Q/N155C, 4CS/S10C/D35N/N155C, 4CS/S10C/D37N/N155C, 4CS/S10C/E31Q/D37N/N155C, 4CS/S10C/D35N/D37N/N155C, 4CS/E6Q/S10C/M51L/K53D/S55T/D110R/N111T/N155C, 4CS/S10C/K53D/H109Y/N155C, 4CS/S10C/D37N/K53D/N155C, 4CS/S10C/D35N/K53D/N155C, 4CS/K8E/S10C/K53D/N155C, 4CS/S10C/E31Q/K53D/N155C, 4CS/S10C/N41Q/K53D/N155C, 4CS/S10C/K53D/P57V/N155C, 4CS/S10C/K53D/P57T/N155C, 4CS/E6Q/S10C/K53D/N111T/N155C, E6A/K53A, D35N/K53A, N41Q/K53A, D35N/N41Q/K53A, D35N/N41Q, D37N/K53A, E6Q/K53D, E6Q/M51K/K53D, M51K/K53D, M51K/K53E, E6Q/K53E, E6Q/M51K/K53E, E6Q/M51K/P57E, M51K/P57E, E6Q/P57E, K53G/P57E, K53T/P57E, K53A/P57E, M51L/K53D, K53D/D110R, K53D/N111T, K53D/S55T, K53D/S55T/D110R, M51L/K53D/S55T/D110R/N111T, M51L/K53D/S55T/D110R, K53D/S55T/D110R/N111T, K53D/S55T/N111T, D35N/D37N, E6QN151L/K53D/S55T/D110R/N111T, K53D/H109Y, D37N/K53D, D35N/K53D, K8E/K53D, N41Q/K53D, K53D/P57V, K53D/P57T, E6Q/K53D/N111T, Q56L/P57T, K93D/T95E, K93N/T95E, E156Q/D157N, D23N/R27Q, Q56L/T95E, K96Q/S119L, E141K/I149V, E141Q/I149V, S7P/S50Y, 180T/I81L, P57A/S119L, P57A/180T/181L/S119L, P57A/K93D/T95E/S119L, I80T/S119L, 180T/I81L/K93D/T95E, P57A/180T/I81L/K93D/T95E/S119L, P57A/180T/S119L, N14C/S127C, M33C/S38C, S76C/L138C, S10C/I49C, L15C/R147C, P28C/L136C, S50C/P88C, T63C/P88C, V62C/Q103C, S10C/N155C, S65C/P88C, S7C/S50C, D54C/A61C, A126C/K139C, C38R/C127W, E31Q/K53A, E31Q/D35N/K53A, E31Q/N41Q/K53A, E31Q/D35N/N41Q/K53A, E31Q/D35N, E31Q/N41Q, E31Q/D35N/N41Q, E31Q/D37N, E31Q/D37N/K53A, S10C/E31Q/I49C, L15C/E31Q/R147C, P28C/E31Q/L136C, E31Q/S50C/P88C, E31Q/T63C/P88C, E31Q/V62C/Q103C, S10C/E31Q/N155C, E31Q/S65C/P88C, S7C/E31Q/S50C, E31Q/D54C/A61C, E31Q/A126C/K139C, N14W/E31Q, E31Q/D146Y, E31Q/D146L, E31Q/D146F, E31Q/Q103L, E31Q/Q103I, E31Q/M150F, Ql8L/E31Q, S7P/E31Q, V11I/E31Q, D23N/E31Q, D23 S/E31Q, R27Q/E31Q, L29V/E31Q, E31Q/T34P, E31Q/R39T, E31Q/R39S, E31Q/R44Q, E31Q/I46V, E31Q/S50Y, E31Q/Q56L, E31Q/Q56L/P57T, E31Q/P57T, E31Q/P57V, E31Q/M60L, E31Q/K67Q, E31Q/E69K, E31Q/I71M, E31Q/E77K, E31Q/I80T, E31Q/I81V, E31Q/I81L, E31Q/N87S, E31Q/D90E, E31Q/K93D/T95E, E31Q/K93N/T95E, E31Q/T95E, E31Q/K96G, E31Q/S97N, E31Q/N111D, E31Q/M1131, E31Q/S119L, E31Q/L144N, E31Q/R147K, E31Q/I149V, E31Q/M150T, E31Q/E156Q/D157N, D23N/E31Q/R27Q, E31Q/Q56L/T95E, E31Q/K96Q/S119L, E31Q/E141K/I149V, E31Q/E141Q/I149V, S7P/E31Q/S50Y, E31Q/180T/181L/delD193, E31Q/P57A/S119L/delD193, E31Q/P57A/180T/181L/S 11 9L/delD193, E31Q/P57A/K93D/T95E/S119L/delD193, E31Q/I80T/S119L/delD193, E31Q/I80T/I81L/K93D/T95E/delD193, E31Q/P57A/180T/181L/K93D/T95E/S119L/delD193, S7C/E31Q/S50C/delD193, S7C/E31Q/S50C/P57A/delD193, S7C/E31Q/S50C/S119L/delD193, S7C/E31Q/S50C/I80T/delD193, S7C/E31Q/S50C/I80T/S119L/delD193, S7C/E31Q/S50C/P57A/I80T/S119L/delD193, S10C/E31Q/N155C/delD193, S10C/E31Q/P57A/N155C/delD193, S10C/E31Q/S119L/N155C/delD193, S10C/E31Q/I80T/N155C/delD193, S10C/E31Q/I80T/S119L/N155C/delD193, S10C/E31Q/P57A/I80T/S119L/N155C/delD193, S10C/E31Q/I49C/delD193, L15C/E31Q/R147C/delD193, E31Q/T63C/P88C/delD193, S10C/D35E/N155C, S10C/S36D/N155C, S10C/S36N/N155C, S10C/K53V/N155C, S10C/K53Y/N155C, S10C/K53F/N155C, S10C/M51R/N155C, S10C/M51L/N155C, S10C/M51H/N155C, S10C/M51F/N155C, S10C/M51Y/N155C, S10C/S55D/N155C, S10C/S55E/N155C, S10C/S55T/N155C, S10C/P57Q/N155C, S10C/P57D/N155C, S10C/P57Y/N155C, S10C/P57N/N155C, S10C/M60Y/N155C, S10C/M60F/N155C, S10C/D110Q/N155C, S10C/D110R/N155C, S10C/N111D/N155C, S10C/N111S/N155C, S10C/N111T/N155C, S10C/N111E/N155C, S10C/D132Q/N155C, S10C/D132E/N155C, E6Q/S10C/K53D/N155C, E6Q/S10C/M51K/K53D/N155C, S10C/E31Q/D35N/N41Q/K53A/N155C, S10C/E31Q/N41Q/K53A/N155C, S10C/E31Q/K53A/N155C, S10C/K53T/N155C, S10C/P57A/N155C, S10C/M51K/K53D/N155C, S10C/M51K/K53E/N155C, E6Q/S10C/K53E/N155C, E6Q/S10C/M51K/K53E/N155C, E6Q/S10C/M51K/P57E/N155C, S10C/M51K/P57E/N155C, E6Q/S10C/P57E/N155C, S10C/E31Q/K53T/N155C, S10C/K53G/P57E/N155C, S10C/K53T/P57E/N155C, S10C/K53A/P57E/N155C, S10C/P57E/N155C, S10C/K53D/N155C, S10C/E31Q/N41Q/N155C, S10C/K53A/N155C, S10C/K53G/N155C, S10C/K53E/N155C, S10C/K53S/N155C, S10C/M51L/K53D/N155C, S10C/K53D/D110R/N155C, S10C/K53D/N111T/N155C, S10C/K53D/S55T/N155C, S10C/K53D/S55T/D110R/N155C, S10C/M51L/K53D/S55T/D110R/N111T/N155C, S10C/M51L/K53D/S55T/D110R/N155C, S10C/K53D/S55T/D110R/N111T/N155C, S10C/K53D/S55T/N111T/N155C, S10C/E31Q/D35N/N155C, S10C/N41Q/N155C, S10C/D35N/N155C, S10C/D37N/N155C, S10C/E31Q/D37N/N155C, S10C/D35N/D37N/N155C, E6Q/S10C/M51L/K53D/S55T/D110R/N111T/N155C, S10C/K53D/H109Y/N155C, S10C/D37N/K53D/N155C, S10C/D35N/K53D/N155C, K8E/S10C/K53D/N155C, S10C/E31Q/K53D/N155C, S10C/N41Q/K53D/N155C, S10C/K53D/P57V/N155C, S10C/K53D/P57T/N155C, or E6Q/S10C/K53D/N111T/N155C.

[0176] Additional IL-18 positions suitable for engineering substitutions, specific substitutions, and specific variants are known in the art which may find use in the IL18 variants and IL18-Fc fusions of the invention. Such positions, substitutions and variants are, for example, described in US 2021/0015891, US 2019/0070262, WO 2022/094473 and Zhou et al. 2020 (e.g., Y1, L5, K8, D17, E31, T34, D35, S36, D37, C38, D40, N41, M51, K53, S55, Q56, P57, G59, M60, C68, E77, Q103, 5105, H109, D110, N111, M113, R131, V153, and N155 as in Y1R, Y1H, Y1D, Y1L, Y1F, LSH, L51, L5Y, LSF, K8Q, K8R, D17G, D17R, D17H, D17A, E31K, E31A, E31T, E31G, E31R, T34E, T34K, T34A, D35A, D35S, D35Y, S36N, S36K, S36R, D37P, D37R, D37V, D37A, D37L, D37H, C38S, D40A, D4OS, D40Y, N41R, N41S, N41K, M51T, M51K, M51D, M51N, M51E, M51R, M51F, M51I, M51L, K53R, K53G, K53S, K53T, S55K, S55R, Q56E, Q56A, Q56R, Q56V, Q56G, Q56K, Q56L, Q56H, P57L, P57G, P57A, P57K, G59A, G59T, M60K, M60Q, M6OR, M60L, M60I, M60F, C68D, E77D, Q103E, Q103K, Q103P, Q103A, Q103R, Q103I, Q103L, S105D, S105N, S105R, S105K, S105A, H109A, H109P, H109D, D110K, D110H, D110N, D110Q, D110E, D110S, D110G,N111H, N111Y,N111D, N111R, N111S, N111G, M113V, M113R, M113T, M113K, M113F, M1131, M113L, R131S, V1531, V153T, V153A, N155K, N155H, M51T/M60K/S105D/D110K/N111H, M51T/S55K/G59A/M60K/S105D/D110K/N111H/V153I, Y1R/M51TNI60K/S105D/D110K/N111H, Y1R/M51T/K53R/M60K/S105N/D110K/N111Y, K8Q/M51T/S55K/G59TNI60K/S105R/D110H/N155K, K8R/M51K/S55K/G59A/M60Q/S105D/D110K/N111H/V153I, K8R/M51D/S55K/G59A/M60X/S105D/D110K/N111H/V153I, L5H/M51T/K53R/M60K/S105D/D110N/V153T, L5I/M51K/S55K/G59A/M60Q/S105K/D110Q/N111H/N155K, L51/M51T/S55R/M60K/Q103E/S105D/D110H/N111H/V153I, L51/M51T/S55K/M6OK/S105D/D110K/N111H/V153T/N155H, L51/M51T/S55K/G59A/M60K/S105R/D110H/N111H/V1531/N155K, L51/K8R/M51T/S55K/M6OK/S105D/N111Y/V1531/N155K, L5Y/K8R/M51T/K53R/M60K/S105D/D110E/N111H/N155K, Y1H/L5YN151T/K53R/M60K/S105D/D110H/N155K, Y1R/M51T/K53R/G59A/M60K/S105D/D110Q/N111H/V153A/N155K, Y1R/K8R/M51D/K53R/M6OR/Q103K/S105N/D110K/N111Y/N155H, Y1R/K8R/M51N/K53R/M60Q/Q103K/S105R/D110N/N111H/N155K, Y1R/K8R/M51T/M60K/S105D/D110K/N111H, Y1R/L5H/M51T/K53R/M60K/Q103E/S105N/D110K/N111Y, Y1R/K8R/M51T/K53R/G59A/M60K/Q103E/S105D/D110Q/N111H/V1531/N155X, Y1R/K8R/M51T/K53R/G59TNI60K/S105N/D110H/N111D/N155H, Y1R/K8R/M51T/G59A/M60K/Q103E/S105D/D110Q/N111H/V1531/N155K, Y1R/L5HNI51T/K53R/M60K/Q103E/S105N/D110K/N111Y, Y1R/L5YN151T/G59TNI60K/E77D/S105D/D110K/N111H, Y1R/K8R/M51T/K53R/G59TN160K/S105K/D110N/N111H/N155K, M51E/Q56E/P57L/M6OR/Q103P/S105A/D110N/N111R/M113V, M51K/Q56A/P57G/M60L/Q103E/S105D/D110S/M113V, M51K/K53G/Q56A/P57A/M60L/D110K/N111R, M51K/K53G/Q56R/P57G/M60L/Q103E/S105D/D110N/N111SN1113R, M51K/K53G/Q56VNI6OL/Q103A/S105A/D110S/N111R/M113T, M51K/K53S/Q56G/P57A/M60L/Q103A/S105A/D110G/N111R/M113T, M51K/K53S/Q56K/P57A/Q103A/S105D/D110S/N111SN1113R, M51K/K53S/Q56L/P57A/M60L/S105D/D110S/N111R, M51K/K53S/Q56R/P57A/M60L/S105N/D110G/N111R, M51K/K53S/Q56R/P57A/M60L/Q103A/D110G/N111R/M113T, M51K/K53S/Q56R/P57A/M60L/Q103A/S105D/D110S/N111GN1113R, M51K/K53T/Q56R/M60L/Q103E/S105D/D110S/N111SN1113K, M51K/K53T/Q56R/P57A/Q103E/S105D/D110N/N111D/M113R, M51R/Q56G/P57K/M60L/Q103R/D110S/N111R/M113V, M51K/K53G/Q56G/P57A/M60L/Q103E/S105D/D110S/N111G/M113V, M51K/K53G/Q56R/S105A/D110N/N111R, M51K/K53S/Q56L/P57A/M60L/S105D/D110S/N111R, M51K/K53S/Q56R/P57A/M60L/Q103A/D110G/N111R/M113T, M51K/K53S/Q56R/P57A/M60L/S105N/D110G/N111R, M51K/K53G/Q56VNI6OL/Q103A/S105A/D110S/N111R/M113T, M51K/K53S/Q56R/P57A/M60L/Q103A/D110G/N111R/M113T, M51K/K53S/Q56R/P57A/M60L/Q103A/S105D/D110S/N111GN1113R, Y1H/D17G/E31K/D35A/D40A/M51F/Q103I/H109A/M113F, Y1D/E31A/S36N/D37P/D40S/M151F/M60I/Q103L/H109P, Y1H/D17G/E31A/T34E/D35A/D37P/M51F/M60L/Q103L, Y1L/D17G/E31A/D35S/D37P/D40S/N41R/M51F/M6OF/Q103I/M113I, Y1H/E31T/T34E/D35S/S36K/D37P/N41S/M60I/Q103I/M113F, D17R/E31T/D35Y/S36K/M51F/M60F/Q103I/H109A/M113I, Y1H/D17G/E31G/T34E/D35A/D37P/M51F/Q103I/H109A/M113L, Y1H/D17G/E31T/D35S/N41K/M51F/M60L/Q103L/H109P/M113F, Y1H/D17G/E31A/T34E/D35S/S36N/D37R/N41S/M60F/Q103L/M113I, D17G/E31T/D35A/D37P/M51F/M60L/Q103L/M113I/D132S, Y1D/E31A/T34K/D35 S/S36N/D37V/D40A/Q103I/H109P/M113L, Y1H/D17G/E31G/T34E/D35A/D37P/D40A/N41K/M51I/M60F/Q103L/M113F/D132S, Y1H/D17G/E31A/T34A/D35S/S36N/D37R/D40A/M60F/Q103I/H109P/M113F, E31A/T34K/D35A/S36K/D37A/D40 S/M51F/M60F/Q103L/H109A/M113I, Y1H/D17H/E31T/T34A/S36N/D37A/M51F/M60L/Q103I/H109D, D17G/E31T/T34K/D35 S/S36N/D37L/D40 S/M51F/M60I/Q103I/H109D/M113I, Y1H/D17G/E31R/T34A/D35A/D37H/N41S/M51I/M60F/Q103L/M113I, E31A/T34A/D35S/S36N/D37P/D40Y/N41K/M60L/Q103L/H109A/M113L, Y1H/D17G/E31T/T34A/D35S/S36N/D37H/D40Y/M60L/Q103L/H109A/M113I, Y1H/D17G/E31A/S36N/D37P/D40 S/N41R/M51F/Q103I/M113F, D17G/E31T/D35A/D37H/D40 S/N41 S/M51L/Q103L/M113F, D17G/E31T/T34E/D35Y/S36R/D37L/D40A/M51F/Q56H/M60L/Q103L/H109D/M113L, D17G/E31T/T34E/D35S/D37L/M51L/Q103L/H109A/M113F/D132S, D17G/E31K/T34E/D35A/S36N/D40S/N41S/M51I/M60L/Q103I/H109A, Y1D/E31A/T34K/D35A/D37A/D40A/M60L/Q103L/M113F, D17G/E31G/D35A/S36K/D37H/D40A/N41R/M51F/Q103I/H109A/M113F, Y1F/L5F/D17G/E31T/T34E/D35S/S36K/N41R/M51F/M60L/Q103L/M113L, Y1F/D17G/E31A/T34A/D35S/S36N/D37H/D40A/M51L/M60L/Q103I, D17G/E31A/D35 S/S36K/D37R/M51L/M60F/Q103I/M113I, Y1L/L5H/D17G/E31G/T34E/D35S/D37P/D40Y/M51F/M60L/Q103I, D17A/E31T/D35A/D37P/D40 S/N41 S/M51L/M60L/Q103L/H109P/M113I, D17G/E31A/Q103L, D17G/E31A/D35S/M51F/Q103L, D17G/E31A/T34E/D35 S/M51F/M60L/Q103L, M51K/K53S/Q56L/D110N/N111R, M51K/K53S/Q56L/P57A/M60L/D110N/N111R, M51K/K53S/Q56L/P57A/M60L/S105D/D110N/N111R, C38 S/M51K/K53 S/Q56L/P57A/M60L/C68D/S105D/D110 S/N111R, M51G/K53A/Q56R/M60K, C38S/C68S, C38S/C68G, C38S/C68A, C38S/C68V, C38S/C68D, C38S/C68E, C38S/C68N, and Y1H/M51A/K53G/Q56R/P57A/M60K); WO2003057821 (SLOT, 112V, T45S, F47Y, Y52F, I64V, F101Y, LSV, L20V, L20I, F21Y, I22V, V66I, S72T, S148F, K4E, E6I, KBD, R131, L15R, D17K, R27K, F30A, D35K, D37F, C38E, R39A, D4OW, M51E, K53G, Q56I, R58A, V62K, D94K, T95F, R104L, G1081, N111K, K129F, R131D, D132L, L133E, F134A, M150T, and F151S); U.S. Pat. No. 6,800,479 (D35E and D40E); U.S. Pat. No. 7,524,488, U.S. Pat. No. 7,875,709, WO 2002/101049, and Kim et al. 2001 (e.g., E42, 185, K89, M96, D130, K132, P143, M149, and L189 as in E42A, K89A, and E42A/K89A); and Saetang et al. 2016 (e.g., E6K, M33Q, M60Q, and T63A). In some embodiments, one or more of the foregoing substitutions and variants may be used in combination with any of the other IL-18 substitutions and variants described herein (e.g. those that exhibit reduced binding affinity to the IL18 receptor 1 (IL18R1), IL18 receptor accessory protein (IL18RAP), IL18R1:IL18RAP complex and/or the IL18 binding protein (IL18BP), compared to wildtype human IL18; those that exhibit reduced heterogeneity; those that exhibit improved production yield; those that exhibit modulated potency; those that exhibit improved stability, and/or those that exhibit reduced IL18BP sink) to engineer IL18 variants of the invention. In some embodiments, each of these substitutions and variants may be used alone or in combination in the IL18-Fc fusion proteins of the invention. In some embodiments, each of these substitutions and variants may be used in combination with other IL-18 substitutions and variants described herein in the IL18-Fc fusion proteins of the invention. In some embodiments, the IL18 variants or IL18-Fc fusions include alternative substitutions at any of the foregoing positions.

[0177] In some embodiments, the IL18 variant of the IL18-Fc fusion protein includes one or more amino acid substitutions provided in FIGS. 13A-13B, 14, 15A-15D, 16A-16E, 17A-17B, 18, 19A-19P, 20A-20D, 31, 36, 37, 39A-39B, 40, 41A-41C, 42A-42D, 43A-43B, 44A-44C, 45, 46, 47, 48, 51, 54, and 62. In some embodiments, the IL18 variant of the IL18-Fc fusion protein is depicted in any one of FIGS. 13A-13B, 14, 15A-15D, 16A-16E, 17A-17B, 18, 19A-19P, 20A-20D, 41A-41C, 42A-42D, 43A-43B, and 44A-44C. In certain embodiments, the IL18 variant includes an amino acid sequence set forth in SEQ ID NOS:84-238 and 799-949.

[0178] V. Interleukin 18-Fusion Variants

[0179] In some embodiments, the IL18-Fc fusion proteins described include one or more modifications (including an amino acid addition, deletion and substitution) to reduce binding to IL18BP. In some embodiments, the IL18-Fc fusion proteins include one or more modifications to reduce binding to IL18 receptors. In some embodiments, the IL18-Fc fusion proteins include one or more modifications to improve stability of the fusion proteins compared to wildtype IL18. In some embodiments, the IL18-Fc fusion proteins include one or more modifications for improving the production (such as, but not limited to, reducing heterogeneity of such proteins during manufacturing) of such fusion proteins. In some embodiments, the IL18-Fc fusion proteins include one or more modifications to remove free cysteines.

[0180] In certain embodiments, the IL18 includes one or more modifications to reduce heterogeneity that may affect IL18-Fc fusion protein production and/or activity. In some embodiments, such IL18 variants include one or more modifications to remove one or more free cysteines. In some embodiments, a cysteine (C) of a wildtype IL18 is substituted with a serine (S). Exemplary residues that may be modified to reduce heterogeneity and improve production include one or more amino acid residues selected from the group consisting of C38, C68, C76 and C127.

[0181] Particular modifications to reduce heterogeneity include amino acid substitutions C38S, C68S, C76S, C127S, C38S/C68S, C38S/C76S, C38S/C127S, C68S/C76S, C68S/C127S, C76S/C127S, C38S/C68S/C76S, C38S/C68S/C127S, C38S/C76S/C127S, C68S/C76S/C127S, C38S/C68S/C76S/C127S, (also referred to as the “4CS” substitutions) and combinations thereof. In some embodiments, the amino acid substitutions C38S/C68S/C76S/C127S of IL18 is herein referred to as the “4CS” substitutions.

[0182] In certain embodiments, the IL18-Fc fusion proteins include one or more modifications to improve production of such fusion proteins. For instance, one or more of the modifications is directed to reduce the potential impact of post-translational modification related liabilities. Residues which may be modified include removing the C-terminal lysine on one or both Fc domains. In some embodiments, the modification includes a K447 deletion (K447 or K447del) in one or both Fc domains. Such modifications are depicted in the heterodimeric Fc backbones of FIGS. 9A-9D.

[0183] Exemplary IL18 variants that can be included in the IL18-Fc fusion proteins include, but are not limited to those in FIGS. 13A-20D and 41A-44C. In some embodiments, the IL18-Fc fusion protein includes one or more of the IL18 variants in FIGS. 13A-20D and 41A-44C. In certain embodiments, the IL18-Fc fusion protein includes an IL18 that includes 1, 2, 3, 4, 5, 6, 7, 8, 9, 10 or more additional modifications as compared to an IL18 variant in FIGS. 13A-20D and 41A-44C.

[0184] In some embodiments, the IL18 variant is engineered to remove a possible “DG” aspartic acid isomerization motif, such as those found when the C-terminus of IL18 is covalently attached to a G4S linker. In certain embodiments, the C-terminus of IL18 is covalently attached to the glutamic acid (E) residue of the hinge region of the Fc domain. In some embodiments, the IL18 variant of the fusion protein comprises a deletion or substitution at the C-terminal aspartic acid (D) residue (D). In certain embodiments, the IL18 variant includes a modification such as a D157del (D157_), D157S, or D157A modification. In some embodiments, the C-terminus of IL18 is covalently attached to a linker selected from the group consisting of AGGGG (SEQ ID NO: 39) or EAAAK (SEQ ID NO:40).

[0185] In some embodiments, the IL18-Fc fusion protein includes a format to improve the production of the fusion protein. In some instances, the IL18-Fc fusion protein includes a Fab-Fc chain occupying the empty-Fc chain. In some embodiments, the Fab arm is a silent Fv. In some embodiments, the silent Fv is based on SEQ ID NOS:23 and 24 as disclosed in the sequence listing of WO 2020/078905. In some embodiments, the format comprising a first monomer comprising a IL18 protein or variant thereof and a first Fc domain, a second monomer comprising the heavy chain of an Fab arm and a second Fc domain, and a third monomer comprising the light chain of the Fab arm.

[0186] In some embodiments, the empty-Fc chain of an IL18-Fc fusion protein includes the substitutions H435R/Y436F in the Fc domain. In some embodiments, the empty-Fc chain of the IL18-Fc fusion protein does not include the substitutions H435R/Y436F in the Fc domain. In some embodiments, the Fab-Fc chain of the IL18-Fc fusion protein includes the substitutions H435R/Y436F in the Fc domain. In some embodiments, the Fab-Fc chain of the IL18-Fc fusion protein does not include the substitutions H435R/Y436F in the Fc domain.

[0187] In some embodiments, the IL18 variant of the fusion protein includes a modification at position E31 of IL18. In some embodiments, the IL18 variant includes the amino acid substitution E31Q.

[0188] In some embodiments, the IL18 variant of the fusion protein includes a modification at position K53 of IL18. In some embodiments, the IL18 variant includes the amino acid substitution K53D.

[0189] In one aspect, provided herein are compositions that include any one of the IL18 variants described herein.

[0190] VI. Heterodimerization Variants

[0191] In some embodiments, the dimeric IL18-Fc fusion protein is a heterodimeric IL18-Fc fusion protein. Such heterodimeric proteins include two different Fc domains (one on each of the first and second monomers) that include modifications that facilitate the heterodimerization of the first and second monomers and/or allow for ease of purification of heterodimers over homodimers, collectively referred to herein as “heterodimerization variants.” As discussed below, heterodimerization variants can include skew variants (e.g., the “knobs and holes” and “charge pairs” variants described below) as well as “pI variants” that facilitates the separation of homodimers away from heterodimers. As is generally described in U.S. Pat. No. 9,605,084, hereby incorporated by reference in its entirety and specifically as below for the discussion of heterodimerization variants, useful mechanisms for heterodimerization include “knobs and holes” (“KIH”) as described in U.S. Pat. No. 9,605,084, “electrostatic steering” or “charge pairs” as described in U.S. Pat. No. 9,605,084, pI variants as described in U.S. Pat. No. 9,605,084, and general additional Fc variants as outlined in U.S. Pat. No. 9,605,084 and below.

[0192] 1. Skew Variant

[0193] In some embodiments, the heterodimeric IL18-Fc fusion protein includes skew variants, which are one or more amino acid modifications in a first Fc domain (A) and/or a second Fc domain (B) that favor the formation of Fc heterodimers (Fc dimers that include the first and the second Fc domain; A-B) over Fc homodimers (Fc dimers that include two of the first Fc domain or two of the second Fc domain; A-A or B-B). Suitable skew variants are included in the FIG. 29 of US Publ. App. No. 2016/0355608, hereby incorporated by reference in its entirety and specifically for its disclosure of skew variants, as well as in FIG. 4.

[0194] One mechanism for skew variants is generally referred to in the art as “knobs and holes,” referring to amino acid engineering that creates steric influences to favor heterodimeric formation and disfavor homodimeric formation, as described in USSN 61/596,846, Ridgway et al., Protein Engineering 9(7):617 (1996); Atwell et al., J. Mol. Biol. 1997 270:26; U.S. Pat. No. 8,216,805, all of which are hereby incorporated by reference in their entirety and specifically for the disclosure of “knobs and holes” mutations. This is sometime referred to herein as “steric variants.” The figures identify a number of “monomer A — monomer B” pairs that rely on “knobs and holes”. In addition, as described in Merchant et al., Nature Biotech. 16:677 (1998), these “knobs and holes” mutations can be combined with disulfide bonds to further favor formation of Fc heterodimers.

[0195] An additional mechanism for skew variants that finds use in the generation of heterodimers is sometimes referred to as “electrostatic steering” as described in Gunasekaran et al., J. Biol. Chem. 285(25):19637 (2010), hereby incorporated by reference in its entirety. This is sometimes referred to herein as “charge pairs.” In this embodiment, electrostatics are used to skew the formation towards heterodimerization. As those in the art will appreciate, these may also have an effect on pI, and thus on purification, and thus could in some cases also be considered pI variants. However, as these were generated to force heterodimerization and were not used as purification tools, they are classified as “skew variants”. These include, but are not limited to, D221E/P228E/L368E paired with D221R/P228R/K409R (e.g., these are “monomer” corresponding sets) and C220E/P228E/368E paired with C220R/E224R/P228R/K409R.

[0196] In some embodiments, the skew variants advantageously and simultaneously favor heterodimerization based on both the “knobs and holes” mechanism as well as the “electrostatic steering” mechanism. In some embodiments, the heterodimeric IL18-Fc fusion proteins includes one or more sets of such heterodimerization skew variants. Exemplary skew variants that fall into this category include: S364K/E357Q: L368D/K370S; L368D/K370S: S364K; L368E/K370S: S364K; T411T/E360E/Q362E: D401K; L368D/K370S: S364K/E357L; K370S: S364K/E357Q; a T366S/L368A/Y407V: T366W (optionally including a bridging disulfide, T366S/L368A/Y407V/Y349C: T366W/S354C or T366S/L368A/Y407V/S354C: T366W/Y349C). These variants come in “pairs” of “sets.” That is, one set of the pair is incorporated into the first monomer and the other set of the pair is incorporated into the second monomer. In terms of nomenclature, the pair “S364K/E357Q: L368D/K370S” means that one of the monomers includes an Fc domain that includes the amino acid substitutions S364K and E357Q and the other monomer includes an Fc domain that includes the amino acid substitutions L368D and K370S; as above, the “strandedness” of these pairs depends on the starting pI. It should be noted that these sets do not necessarily behave as “knobs in holes” variants, with a one-to-one correspondence between a residue on one monomer and a residue on the other. That is, these pairs of sets may instead form an interface between the two monomers that encourages heterodimer formation and discourages homodimer formation, allowing the percentage of heterodimers that spontaneously form under biological conditions to be over 90%, rather than the expected 50% (25 homodimer A/A:50% heterodimer A/B:25% homodimer B/B). Exemplary heterodimerization “skew” variants are depicted in FIG. 4.

[0197] In exemplary embodiments, the heterodimeric IL18-Fc fusion protein includes a S364K/E357Q: L368D/K370S; L368D/K370S: S364K; L368E/K370S: S364K; T411T/E360E/Q362E: D401K; L368D/K370S: S364K/E357L; K370S: S364K/E357Q; or a T366S/L368A/Y407V: T366W (optionally including a bridging disulfide, T366S/L368A/Y407V/Y349C: T366W/S354C or T366S/L368A/Y407V/S354C: T366W/Y349C) “skew” variant amino acid substitution set. In an exemplary embodiment, the heterodimeric IL18-Fc fusion protein includes a “S364K/E357Q: L368D/K370S” amino acid substitution set.

[0198] In some embodiments, the skew variants provided herein can be optionally and independently incorporated with any other modifications, including, but not limited to, other skew variants (see, e.g., in FIG. 37 of US Publ. App. No. 2012/0149876, herein incorporated by reference, particularly for its disclosure of skew variants), pI variants, isotpypic variants, FcRn variants, ablation variants, etc. into one or both of the first and second Fc domains of the IL18-Fc fusion protein. Further, individual modifications can also independently and optionally be included or excluded from the subject IL18-Fc fusion proteins.

[0199] 2. pI (Isoelectric point) Variants for Heterodimers

[0200] In some embodiments, the heterodimeric IL18-Fc fusion protein includes purification variants that advantageously allow for the separation of heterodimeric IL18-Fc fusion proteins from homodimeric proteins.

[0201] There are several basic mechanisms that can lead to ease of purifying heterodimeric proteins. One such mechanism relies on the use of pI variants which include one or more modifications that affect the isoelectric point of one or both of the monomers of the fusion protein, such that each monomer, and subsequently each dimeric species, has a different pI, thus allowing the isoelectric purification of A-A, A-B and B-B dimeric proteins. Alternatively, some formats also allow separation on the basis of size. As is further outlined below, it is also possible to “skew” the formation of heterodimers over homodimers using skew variants. Thus, a combination of heterodimerization skew variants and pI variants find particular use in the subject IL18 fusion proteins provided herein.

[0202] Additionally, as more fully outlined below, depending on the format of the heterodimeric Fc fusion protein, pI variants can be either contained within the constant region and/or Fc domains of a monomer, and/or domain linkers can be used. In some embodiments, the heterodimeric IL18-Fc fusion protein includes additional modifications for alternative functionalities can also create pI changes, such as Fc, FcRn and KO variants.

[0203] In the embodiments that utilizes pI as a separation mechanism to allow the purification of heterodimeric IL18-Fc fusion proteins, amino acid modifications can be introduced into one or both of the monomers of the heterodimeric IL18-Fc fusion protein. That is, the pI of one of the monomers (referred to herein for simplicity as “monomer A”) can be engineered away from monomer B, or both monomer A and B can be changed, with the pI of monomer A increasing and the pI of monomer B decreasing. As discussed, the pI changes of either or both monomers can be done by removing or adding a charged residue (e.g., a neutral amino acid is replaced by a positively or negatively charged amino acid residue, e.g., glutamine to glutamic acid), changing a charged residue from positive or negative to the opposite charge (e.g. aspartic acid to lysine) or changing a charged residue to a neutral residue (e.g., loss of a charge; lysine to serine.). A number of these variants are shown in the figures, including, FIGS. 4 and 5.

[0204] Creating a sufficient change in pI in at least one of the monomers such that heterodimers can be separated from homodimers can be done by using a “wild type” heavy chain constant region and a variant region that has been engineered to either increase or decrease its pI (wt A:B+ or wt A:B−), or by increasing one region and decreasing the other region (A+:B− or A−:B+).

[0205] Thus, in general, a component of some embodiments of the present subject fusion proteins are amino acid variants in the Fc domains or constant domain regions that are directed to altering the isoelectric point (p1) of at least one, if not both, of the monomers of a dimeric protein by incorporating amino acid substitutions (“pI variants” or “pI substitutions”) into one or both of the monomers. The separation of the heterodimers from the two homodimers can be accomplished if the pIs of the two monomers differ by as little as 0.1 pH unit, with 0.2, 0.3, 0.4 and 0.5 or greater all finding use in the present invention.

[0206] As will be appreciated by those in the art, the number of pI variants to be included on each or both monomer(s) of a heterodimeric IL18-Fc fusion protein to achieve good separation will depend in part on the starting pI of the components. That is, to determine which monomer to engineer or in which “direction” (e.g., more positive or more negative), the sequences of the Fc domains and any IL18 or linker included in each monomer are calculated and a decision is made from there based on the pIs of the monomers. As is known in the art, different Fc domains, linkers and IL18s will have different starting pIs. In general, as outlined herein, the pIs are engineered to result in a total pI difference of each monomer of at least about 0.1 logs, with 0.2 to 0.5 being preferred as outlined herein.

[0207] In general, as will be appreciated by those in the art, there are two general categories of amino acid modifications that affect p1: those that increase the pI of the protein (basic changes) and those that decrease the pI of the protein (acidic changes). As described herein, all combinations of these variants can be used: one monomer may include a wild type Fc domain, or a variant Fc domain that does not display a significantly different pI from wild-type, and the other monomer includes a Fc domain that is either more basic or more acidic. Alternatively, each monomer may be changed, one to more basic and one to more acidic.

[0208] In the case where pI variants are used to achieve heterodimerization, a more modular approach to designing and purifying heterodimeric IL18-Fc fusion proteins is provided. Thus, in some embodiments, heterodimerization variants (including skew and pI variants) must be engineered. In addition, in some embodiments, the possibility of immunogenicity resulting from the pI variants is significantly reduced by importing pI variants from different IgG isotypes such that pI is changed without introducing significant immunogenicity (see isotypic variants below). Thus, an additional problem to be solved is the elucidation of low pI constant domains with high human sequence content, e.g., the minimization or avoidance of non-human residues at any particular position. Alternatively, or in addition to isotypic substitutions, the possibility of immunogenicity resulting from the pI variants is significantly reduced by utilizing isosteric substitutions (e.g. Asn to Asp; and Gln to Glu).

[0209] A side benefit that can occur with this pI engineering is also the extension of serum half-life and increased FcRn binding. That is, as described in US Publ. App. No. US 2012/0028304 (incorporated by reference in its entirety and specifically for the disclosure of pI variants that provide additional function), lowering the pI of antibody constant domains (including those found in Fc fusions) can lead to longer serum retention in vivo. These pI variants for increased serum half-life also facilitate pI changes for purification.

[0210] In addition, it should be noted that the pI variants of the heterodimerization variants give an additional benefit for the analytics and quality control process of Fc fusion proteins, as the ability to either eliminate, minimize and distinguish when homodimers are present is significant. Similarly, the ability to reliably test the reproducibility of the heterodimeric Fc fusion protein production is important.

[0211] Exemplary combinations of pI variants are shown in FIGS. 4 and 5, and FIG. 30 of US Publ. App. No. 2016/0355608, all of which are herein incorporated by reference in its entirety and specifically for the disclosure of pI variants. As outlined herein and shown in the figures, these changes are shown relative to IgG1, but all isotypes can be altered this way, as well as isotype hybrids. In the case where the heavy chain constant domain is from IgG2-4, R133E and R133Q can also be used.

[0212] In one embodiment, the heterodimeric IL18-Fc fusion protein includes a monomer with a variant Fc domain having pI variant modifications 295E/384D/418E/421D (Q295E/N384D/Q418E/N421D when relative to human IgG1). In one embodiment, the heterodimeric IL18-Fc fusion protein includes a monomer with a variant Fc domain having pI variant modifications 217R/228R/276K (P217R/P228R/N276K when relative to human IgG1). Additional exemplary pI variant modification that can be incorporated into the Fc domain of a subject are depicted in FIG. 5.

[0213] In some embodiments, modifications are made in the hinge of the Fc domain, including positions 216, 217, 218, 219, 220, 221, 222, 223, 224, 225, 226, 227, 228, 229, and 230 based on EU numbering. Thus, pI mutations and particularly substitutions can be made in one or more of positions 216-230, with 1, 2, 3, 4 or 5 mutations finding use. Again, all possible combinations are contemplated, alone or with other pI variants in other domains.

[0214] Specific substitutions that find use in lowering the pI of hinge domains include, but are not limited to, a deletion at position 221, a non-native valine or threonine at position 222, a deletion at position 223, a non-native glutamic acid at position 224, a deletion at position 225, a deletion at position 235 and a deletion or a non-native alanine at position 236. In some cases, only pI substitutions are done in the hinge domain, and in others, these substitution(s) are added to other pI variants in other domains in any combination.

[0215] In some embodiments, mutations can be made in the CH2 region, including positions 233, 234, 235, 236, 274, 296, 300, 309, 320, 322, 326, 327, 334 and 339, based on EU numbering. It should be noted that changes in 233-236 can be made to increase effector function (along with 327A) in the IgG2 backbone. Again, all possible combinations of these 14 positions can be made; e.g., an IL18-Fc fusion protein may include a variant Fc domain with 1, 2, 3, 4, 5, 6, 7, 8, 9 or 10 CH2 pI substitutions.

[0216] Specific substitutions that find use in lowering the pI of CH2 domains include, but are not limited to, a non-native glutamine or glutamic acid at position274, a non-native phenylalanine at position 296, a non-native phenylalanine at position 300, a non-native valine at position 309, a non-native glutamic acid at position 320, a non-native glutamic acid at position 322, a non-native glutamic acid at position 326, a non-native glycine at position 327, a non-native glutamic acid at position 334, a non-native threonine at position 339, and all possible combinations within CH2 and with other domains.

[0217] In this embodiment, the modifications can be independently and optionally selected from position 355, 359, 362, 384, 389,392, 397, 418, 419, 444 and 447 (EU numbering) of the CH3 region. Specific substitutions that find use in lowering the pI of CH3 domains include, but are not limited to, a non-native glutamine or glutamic acid at position 355, a non-native serine at position 384, a non-native asparagine or glutamic acid at position 392, a non-native methionine at position 397, a non-native glutamic acid at position 419, a non-native glutamic acid at position 359, a non-native glutamic acid at position 362, a non-native glutamic acid at position 389, a non-native glutamic acid at position 418, a non-native glutamic acid at position 444, and a deletion or non-native aspartic acid at position 447.

[0218] 3. Isotypic Variants

[0219] In addition, some embodiments of the IL18-Fc fusion proteins provided herein rely on the “importation” of pI amino acids at particular positions from one IgG isotype into another, thus reducing or eliminating the possibility of unwanted immunogenicity being introduced into the variants. A number of these are shown in FIG. 21 of US Publ. App. No. 2014/0370013, hereby incorporated by reference, particularly for its disclosure of isotypic variants. That is, IgG1 is a common isotype for therapeutic antibodies for a variety of reasons, including high effector function. However, the heavy constant region of IgG1 has a higher pI than that of IgG2 (8.10 versus 7.31). By introducing IgG2 residues at particular positions into the IgG1 backbone, the pI of the resulting monomer is lowered (or increased) and additionally exhibits longer serum half-life. For example, IgG1 has a glycine (pI 5.97) at position 137, and IgG2 has a glutamic acid (pI 3.22); importing the glutamic acid will affect the pI of the resulting protein. As is described below, a number of amino acid substitutions are generally required to significantly affect the pI of the variant Fc fusion protein. However, it should be noted as discussed below that even changes in IgG2 molecules allow for increased serum half-life.

[0220] In other embodiments, non-isotypic amino acid modifications are made, either to reduce the overall charge state of the resulting protein (e.g., by changing a higher pI amino acid to a lower pI amino acid), or to allow accommodations in structure for stability, etc. as is further described below.

[0221] In addition, by pI engineering both the heavy and light constant domains, significant modifications in each monomer of the heterodimer can be seen. As discussed herein, having the pIs of the two monomers differ by at least 0.5 can allow separation by ion exchange chromatography or isoelectric focusing, or other methods sensitive to isoelectric point.

[0222] 4. Calculating pI

[0223] The pI of each monomer of the IL18-Fc fusion protein can depend on the pI of the variant Fc domain and the pI of the total monomer, including the variant Fc domain and any IL18 and/or domian linker included in the monomer. Thus, in some embodiments, the change in pI is calculated on the basis of the variant Fc domain, using the chart in the FIG. 19 of US Publ. App. No. 2014/0370013, hereby incorporated by reference, particularly for its disclosure of methods of calculating pI. As discussed herein, which monomer to engineer is generally decided by the inherent pI of each monomer.

[0224] 5. pI Variants that also confer better FcRn in vivo binding

[0225] In the case where the pI variant(s) decreases the pI of the monomer, such modifications can have the added benefit of improving serum retention in vivo.

[0226] Fc regions are believed to have longer half-lives in vivo, because binding to FcRn at pH 6 in an endosome sequesters the Fc (Ghetie and Ward, 1997 Immunol Today. 18(12): 592-598, entirely incorporated by reference). The endosomal compartment then recycles the Fc to the cell surface. Once the compartment opens to the extracellular space, the higher pH, —7.4, induces the release of Fc back into the blood. In mice, Dall' Acqua et al. showed that Fc mutants with increased FcRn binding at pH 6 and pH 7.4 actually had reduced serum concentrations and the same half-life as wild-type Fc (Dall' Acqua et al. 2002, J. Immunol. 169:5171-5180, entirely incorporated by reference). The increased affinity of Fc for FcRn at pH 7.4 is thought to forbid the release of the Fc back into the blood. Therefore, the Fc modifications that will increase Fc's half-life in vivo will ideally increase FcRn binding at the lower pH while still allowing release of Fc at higher pH. The amino acid histidine changes its charge state in the pH range of 6.0 to 7.4. Thus, it is not surprising to find His residues at important positions in the Fc/FcRn complex.

[0227] VH. Other Fc Variants for Additional Functionality

[0228] In addition to heterodimerization variants, the subject heterodimeric IL18-Fc fusion proteins provided herein may independently include Fc modifications that affect functionality including, but not limited to, altering binding to one or more Fc receptors (e.g., FcγR and FcRn).

[0229] 1. FcγR Variants

[0230] In one embodiment, the IL18-Fc fusion proteins includes one or more amino acid modifications that affect binding to one or more Fcγreceptors (i.e., “FcγR variants”). FcγR variants (e.g., amino acid substitutions) that result in increased binding as well as decreased binding can be useful. For example, it is known that increased binding to FcγRIIIa results in increased ADCC (antibody dependent cell-mediated cytotoxicity; the cell-mediated reaction wherein nonspecific cytotoxic cells that express FcγRs recognize bound antibody on a target cell and subsequently cause lysis of the target cell). Similarly, decreased binding to FcγRIIb (an inhibitory receptor) can be beneficial as well in some circumstances. FcγR variants that find use in the IL18 fusion proteins include those listed in U.S. Pat. Nos. 8,188,321 (particularly FIGS. 41) and U.S. Pat. No. 8,084,582, and US Publ. App. Nos. 20060235208 and 20070148170, all of which are expressly incorporated herein by reference in their entirety and specifically for the variants disclosed therein that affect Fcγreceptor binding. Particular variants that find use include, but are not limited to, 236A, 239D, 239E, 332E, 332D, 239D/332E, 267D, 267E, 328F, 267E/328F, 236A/332E, 239D/332E/330Y, 239D, 332E/330L, 243A, 243L, 264A, 264V and 299T.

[0231] In addition, amino acid substitutions that increase affinity for FcγRIIc can also be independently included in the Fc domain variants outlined herein. Useful substitutions that for FcγRIIc are described in, for example, U.S. Pat. Nos. 8,188,321 and 10,113,001, all of which are expressly incorporated herein by reference in their entirety and specifically for the variants disclosed therein that affect Fcγreceptor binding.

[0232] 2. FcRn Variants

[0233] Further, IL18-Fc fusion proteins described herein can independently include Fc substitutions that confer increased binding to the FcRn and increased serum half-life. Such modifications are disclosed, for example, in U.S. Pat. No. 8,367,805, hereby incorporated by reference in its entirety, and specifically for Fc substitutions that increase binding to FcRn and increase half-life. Such modifications include, but are not limited to 434S, 434A, 428L, 308F, 259I, 428L/434S, 428L/434A, M252Y/S254T/T256E, 259I/308F, 436I/428L, 436I or V/434S, 436V/428L and 259I/308F/428L.

[0234] 3. Ablation Variants

[0235] In some embodiments, the IL18-Fc fusion protein includes one or more modifications that reduce or remove the normal binding of the Fc domain to one or more or all of the Fcγ receptors (e.g., FcγR1, FcγRIIa, FcγRIIb, FcγRIIIa, etc.) to avoid additional mechanisms of action. Such modifications are referred to as “FcγR ablation variants” or “Fc knock out (FcKO or KO)” variants. In some embodiments, particularly in the use of immunomodulatory proteins, it is desirable to ablate FcγRIIIa binding to eliminate or significantly reduce ADCC activity such that one of the Fc domains comprises one or more Fcγreceptor ablation variants. These ablation variants are depicted in FIG. 31 of U.S. Pat. No. 10,259,887, which is herein incorporated by reference in its entirety, and each can be independently and optionally included or excluded, with preferred aspects utilizing ablation variants selected from the group consisting of G236R/L328R, E233P/L234V/L235A/G236del/S239K, E233P/L234V/L235A/G236del/S267K, E233P/L234V/L235A/G236del/S239K/A327G, E233P/L234V/L235A/G236del/S267K/A327G and E233P/L234V/L235A/G236del, according to the EU index. In addition, ablation variants of use in the subject IL18-Fc fusion proteins are also depicted in FIG. 6. It should be noted that the ablation variants referenced herein ablate FcγR binding but generally not FcRn binding.

[0236] VIII. Combination of Heterodimeric and Fc Variants

[0237] As will be appreciated by those in the art, the Fc modifications described herein can independently be combined. For example, all of the recited heterodimerization variants (including skew and/or pI variants) can be optionally and independently combined in any way, as long as they retain their “strandedness” or “monomer partition.”

[0238] In the case of pI variants, while embodiments finding particular use are shown in the figures, other combinations can be generated, following the basic rule of altering the pI difference between two monomers to facilitate purification.

[0239] In addition, any of the heterodimerization variants, may also be independently and optionally combined with other variants described herein including, but not limited to, Fc ablation variants, FcRn variants, and/or half/life extension variants as generally outlined herein.

[0240] Exemplary combinations of modifications are shown in FIG. 7 and the backbone sequences in FIGS. 9 (heterodimeric backbones). In certain embodiments, the IL18-Fc fusion protein is heterodimeric and includes a combination of Fc domain modifications as depicted in FIG. 4. In some embodiments, the heterodimeric IL18-Fc fusion protein includes a first monomer having a first Fc domain with the backbone sequence of any one of the “monomer 1” backbones in FIG. 7 and a second Fc domain with the backbone sequence of a corresponding “monomer 2” backbone in FIG. 7. In certain embodiments, the homodimeric IL18-Fc fusion protein includes a first monomer with a first Fc domain and a second monomer with a second Fc domain, where the first and second Fc domains each have the sequence of any of the backbone sequences in FIGS. 9 and 10.

[0241] In some embodiments, wherein the IL18-Fc fusion protein is a monovalent (i.e., only one IL18), the first monomer includes a first Fc domain with heterodimer skew variants L368D/K370S, isosteric pI variants Q295E/N384D/Q418E/N421D, and FcKO variants E233P/L234V/L235A/G236del/S267K and the second monomer includes a second Fc domain with heterodimer skew variants S364K/E357Q and FcKO variants E233P/L234V/L235A/G236del/S267K, according to the EU index. In some embodiments, the first and second monomers each also include M428L/N434S half-life extension variants. In some embodiments, the first and second monomers each also include a C220S hinge amino acid substitution. In some embodiments, the first and second monomers each also include a N297A or N297S amino acid substitution that removes glycosylation. In some embodiments, the first monomer includes a first Fc domain with modifications C220 S/E233P/L234V/L235A/G236del/S267K/Q295E/L368D/K370 S/N384D/Q418E/N421D and optionally M428L/N434S and the second monomer includes a second Fc domain with modifications C220S/E233P/L234V/L235A/G236del/S267K/S364K/E357Q and optionally modifications M428L/N434S, according to the EU index.

[0242] In some embodiments, wherein the IL18-Fc fusion protein is a monovalent (i.e., only one IL18), the first monomer includes a first Fc domain with heterodimer skew variants L368D/K370S, isosteric pI variants Q295E/N384D/Q418E/N421D, and FcKO variants E233P/L234V/L235A/G236del/S267K and the second monomer includes a second Fc domain with heterodimer skew variants S364K and FcKO variants E233P/L234V/L235A/G236del/S267K, according to the EU index. In some embodiments, the first and second monomers each also include M428L/N434S half-life extension variants. In some embodiments, the first and second monomers each also include a C220S hinge amino acid substitution. In some embodiments, the first monomer includes a first Fc domain with modifications C220 S/E233P/L234V/L235A/G236del/S267K/Q295E/L368D/K370 S/N384D/Q418E/N421D and optionally M428L/N434S and the second monomer includes a second Fc domain with modifications C220S/E233P/L234V/L235A/G236del/S267K/S364K and optionally modifications M428L/N434S, according to the EU index.

[0243] In some embodiments, wherein the IL18-Fc fusion protein is a monovalent (i.e., only one IL18), the first monomer includes a first Fc domain with heterodimer skew variants L368E/K370S, isosteric pI variants Q295E/N384D/Q418E/N421D, and FcKO variants E233P/L234V/L235A/G236del/S267K and the second monomer includes a second Fc domain with heterodimer skew variants S364K and FcKO variants E233P/L234V/L235A/G236del/S267K, according to the EU index. In some embodiments, the first and second monomers each also include M428L/N434S half-life extension variants. In some embodiments, the first and second monomers each also include a C220S hinge amino acid substitution. In some embodiments, the first monomer includes a first Fc domain with modifications C220 S/E233P/L234V/L235A/G236del/S267K/Q295E/L368E/K370 S/N384D/Q418E/N421D and optionally M428L/N434S and the second monomer includes a second Fc domain with modifications C220S/E233P/L234V/L235A/G236del/S267K/S364K and optionally modifications M428L/N434S, according to the EU index.

[0244] In some embodiments, wherein the IL18-Fc fusion protein is a monovalent (i.e., only one IL18), the first monomer includes a first Fc domain with heterodimer skew variants K360E/Q362E/T411E, isosteric pI variants Q295E/N384D/Q418E/N421D, and FcKO variants E233P/L234V/L235A/G236del/S267K and the second monomer includes a second Fc domain with heterodimer skew variants D401K and FcKO variants E233P/L234V/L235A/G236del/S267K, according to the EU index. In some embodiments, the first and second monomers each also include M428L/N434S half-life extension variants. In some embodiments, the first and second monomers each also include a C220S hinge amino acid substitution. In some embodiments, the first monomer includes a first Fc domain with modifications C220S/E233P/L234V/L235A/G236del/S267K/Q295E/K360E/Q362E/384D/T411E/Q418E/N421D and optionally M428L/N434S and the second monomer includes a second Fc domain with modifications C220S/E233P/L234V/L235A/G236de1/D401K and optionally modifications M428L/N434S, according to the EU index.

[0245] In some embodiments, wherein the IL18-Fc fusion protein is a monovalent (i.e., only one IL18), the first monomer includes a first Fc domain with heterodimer skew variants L368D/K370S and a variant that ablates Fab arm exchange, S228P, and the second monomer includes a second Fc domain with heterodimeric pI variants S364K/E357Q and S228P to the EU index. In some embodiments, the first and second monomers each also include M428L/N434S half-life extension variants. In some embodiments, the first and second monomers each also include a C220S hinge amino acid substitution. In some embodiments, the first monomer includes a first Fc domain with modifications C220S/L368D/K370S and optionally M428L/N434S and the second monomer includes a second Fc domain with modifications C220S/S228P/S364K/E357Q and optionally modifications M428L/N434S, according to the EU index. In exemplary embodiments, the Fc domains are human IgG4 Fc domains.

[0246] In some embodiments, wherein the IL18-Fc fusion protein is a monovalent (i.e., only one IL18), the first monomer includes a first Fc domain with heterodimer skew variants L368D/K370S and isosteric pI variants Q295E/N384D/Q418E/N421D and the second monomer includes a second Fc domain with heterodimer skew variants S364K/E357Q, according to the EU index. In some embodiments, the first and second monomers each also include M428L/N434S half-life extension variants. In some embodiments, he first and second monomers each also include a C219S hinge modification. In some embodiments, the first monomer includes a first Fc domain with modifications Q295E/L368D/K370S/384D/Q418E/N421D and optionally M428L/N434S and the second monomer includes a second Fc domain with modifications S364K/E357Q and optionally modifications M428L/N434S, according to the EU index. In exemplary embodiments, the Fc domains are human IgG2 Fc domains.

[0247] In some embodiments, wherein the IL18-Fc fusion protein is a monovalent (i.e., only one IL18), the first monomer includes a first Fc domain with heterodimer skew variants L368D/K370S, isosteric pI variants Q295E/N384D/Q418E/N421D, and FcKO variant S267K and the second monomer includes a second Fc domain with heterodimer skew variants S364K/E357Q and FcKO variant S267K, according to the EU index. In some embodiments, the first and second monomers each also include M428L/N434S half-life extension variants. In some embodiments, he first and second monomers each also include a C219S hinge modification. In some embodiments, the first monomer includes a first Fc domain with modifications S267K/Q295E/L368D/K370S/384D/Q418E/N421D and optionally M428L/N434S and the second monomer includes a second Fc domain with modifications S267K/S364K/E357Q and optionally modifications M428L/N434S, according to the EU index. In exemplary embodiments, the Fc domains are human IgG2 Fc domains.

[0248] In some embodiments, wherein the IL18-Fc fusion protein is a monovalent (i.e., only one IL18), the first monomer includes a first Fc domain with heterodimer skew variants L368D/K370S and FcKO variants E233P/L234V/L235A/G236del/S267K and the second monomer includes a second Fc domain with heterodimer skew variants S364K/E357Q, isosteric pI variants P217R/P228R/N276K, and FcKO variants E233P/L234V/L235A/G236del/S267K, according to the EU index. In some embodiments, the first and second monomers each also include M428L/N434S half-life extension variants. In some embodiments, the first and second monomers each also include a C220S hinge amino acid substitution. In some embodiments, the first monomer includes a first Fc domain with modifications C220S/E233P/L234V/L235A/G236del/S267K/L368D/K370S and optionally M428L/N434S and the second monomer includes a second Fc domain with modifications P217R/C220S/P228R/E233P/L234V/L235A/G236del/S267K/N276K/S364K/E357Q and optionally modifications M428L/N434S, according to the EU index.

[0249] The variant Fc domains provided herein can also include 1, 2, 3, 4, 5, 6, 7, 8, 9, or 10 additional mutations in addition to the enumerated mutations.

[0250] IX. Domain Linkers

[0251] In some embodiments of the subject IL18-Fc fusion protein, an IL18 is covalently attached to an Fc domain by a linker (e.g., (IL18)i-L-Fc). In some embodiments, the linker is a “domain linker.” While any suitable linker can be used, many embodiments utilize a glycine-serine polymer, including for example (GS)ₙ, (GSGGS)ₙ, (GGGGS)ₙ, and (GGGS)ₙ, where n is an integer of at least 0 (and generally from 0 to 1 to 2 to 3 to 4 to 5), as well as any peptide sequence that allows for recombinant attachment of the two domains with sufficient length and flexibility to allow each domain to retain its biological function. In certain cases, useful linkers include (GGGGS)₁ or (GGGGS)₂. Illustrative domain linkers are depicted in FIG. 8. In some cases, and with attention being paid to “strandedness”, as outlined below, charged domain linkers can be used as discussed herein.

[0252] X. IL18-Fc Fusion Protein Formats

[0253] Useful IL18-Fc fusion protein formats are shown in FIG. 12. IL18-Fc fusion proteins provided herein include monovalent IL18-Fc fusion proteins as shown in FIGS. 12A and 21A-21M) and IL18xFab-Fc fusion proteins as shown in FIG. 12B and 22A-22CZ.

[0254] A. IL18-Fc Fusion Proteins

[0255] In some embodiments, the IL18-Fc fusion is monovalent IL18-Fc fusion protein that includes (a) a first monomer that includes an IL18 protein or a variant thereof covalently attached to a first Fc domain and (b) a second monomer that includes a second Fc domain alone (i.e., an “empty Fc”). In some embodiments, the IL18 fusion is monovalent IL18-Fc fusion protein includes (a) a monomer that includes an IL18 covalently attached to an Fc domain and (b) another monomer that includes another Fc domain alone (i.e., an “empty Fc”). See, the schematic diagram in FIG. 12A and the amino acid sequences of FIGS. 21A-21M.

[0256] Any of the IL18s described herein can be included in the monovalent IL18-Fc fusion protein. In some embodiments, the IL18 is wildtype mature human IL18 (FIG. 1A). In certain embodiments, the IL18 is a variant IL18 that includes one or more modifications as depicted in FIGS. 13A-13B, 14, 15A-15D, 16A-16E, 17A-B, 18, 19A-19P, 20A-20D, 31, 36, 37, 39A-39B, 40, 41A-41C, 42A-42D, 43A-13B, 44A-44C, 45, 46, 47, 48, 51, 54, and 62. In some embodiments, the IL18 of the monovalent IL18-Fc fusion proteins is a variant IL18 that includes a modification at one or more positions selected from Y1, E6, S7, K8, S10, V11, N14, L15, D17, Q18, D23, R27, P28, L29, E31, M33, T34, D35, S36, D37, C38, R39, D40, N41, R44, I46, I49, S50, M51, K53, D54, S55, Q56, P57, M60, A61, V62, T63, S65, K67, C68, E69, I71, C76, E77, 180, 181, N87, P88, D90, K93, T95, K96, S97, Q103, H109, D110, N111, M113, S119, A126, C127, D132, L136, L138, K139, E141, L144, D146, R147, I149, M150, N155, E156, and D157 are modified. In some embodiments, the IL18 of the monovalent IL18-Fc fusion proteins is a variant IL18 that includes one or more modifications (e.g., substitutions or deletions) selected from Y1F, Y1H, E6A, E6Q, S7C, S7P, K8E, K8Q, K8Y, S10C, V11I, N14C, N14W, L15C, D17N, Q18L, D23N, D23S, R27Q, P28C, L29V, E31Q, M33C, T34P, D35N, D35E, S36D, S36N, D37N, C38S, C38Q, C38R, C38E, C38L, C38I, C38V, C38K, C38D, R39S, R39T, D40N, N41Q, R44Q, I46V, I49C, S50C, S50Y, M51I, M51K, M51Q, M51R, M51L, M51H, M51F, M51Y, K53A, K53D, K53E, K53G, K53H, K53I, K53L, K53M, K53N, K53Q, K53R, K53S, K53T, K53V, K53Y, K53F, D54C, S55N, S55Q, S55D, S55E, S55T, Q56I, Q56L, P57A, P57E, P57T, P57V, P57Q, P57D, P57Y, P57N, M60I, M60L, M60K, M60Y, M60F, A61C, V62C, T63C, S65C, K67Q, C68S, C68I, C68F, C68Y, C68D, C68N, C68E, C68Q, C68K, E69K, I71M, C76S, C76E, C76K, E77K, 180T, I81L, I81V, N87S, P88C, D90E, K93D, K93N, T95E, K96G, K96Q, 597N, Q103C, Q103E, Q103I, Q103L, H109W, H109Y, D110N, N111D, D110Q, D110R, N111Q, N111S, N111T, N111E, M113I, S119L, A126C, C127S, C127W, C127Y, C127F, C127D, C127E, C127K, D132Q, D132E, L136C, L138C, K139C, E141K, E141Q, L144N, D146F, D146L, D146Y, R147C, R147K, I149V, M150F, M150T, N155C, E156Q, D157A, D157S, D157N, and D157del. In some embodiments, the IL18 variant includes a 4CS substitution (C38S/C68S/C76S/C127S substitutions) and one or more of additional substitutions including S38C, S38E, S38L, S38Q, S38R, S38V, S38K, S38D, S68C, S68D, S68E, S68F, S68I, S68N, S68Q, S68Y, S68K, S76C, S76E, S76K, S127C, S127D, S127F, S127W, S127K, and S127Y. In some embodiments, the amino acid substitution can include 4CS, 4CS/D193S, 4CS/D193A, 4CS/delD193, 4CS/S38E, 4CS/S68E, 4CS/S76E, 4CS/S127E, 4CS/S38K, 4CS/S68K, 4CS/S76K, 4CS/S127K, 4CS/S38D, 4CS/Y1F, 4CS/Y1H, 4CS/E6A, 4CS/E6Q, 4CS/D17N, 4CS/E31Q, 4CS/D35N, 4CS/D37N, 4CS/D40N, 4CS/N41Q, 4CS/K53R, 4CS/K53H, 4CS/K53M, 4CS/K53E, 4CS/K53Q, 4CS/K53A, 4CS/Q103E, 4CS/D110N, 4CS/N111Q, 4CS/E6A/K53A, 4CS/N14C/E31Q/S127C, 4CS/E31Q/K53A, 4CS/E31Q/D35N/K53A, 4CS/E31Q/N41Q/K53A, 4CS/E31Q/D35N/N41Q/K53A, 4CS/E31Q/D35N, 4CS/E31Q/N41Q, 4C S/E31Q/D35N/N41Q, 4C S/E31Q/D37N, 4CS/E31Q/D37N/K53A, 4CS/E31Q/M33C/S38C, 4C S/E31Q/S76C/L138C, 4CS/E31Q/568I, 4CS/E31Q/S68F, 4C S/E31Q/S127W, 4CS/E31Q/S127Y, 4C S/E31Q/S127F, 4CS/S10C/E31Q/149C, 4C S/L15C/E31Q/R147C, 4C S/P28C/E31Q/L136C, 4CS/E31Q/S50C/P88C, 4CS/E31Q/T63C/P88C, 4C S/E31Q/V62C/Q103C, 4CS/S10C/E31Q/N155C, 4CS/E31Q/S65C/P88C, 4CS/S7C/E31Q/S50C, 4CS/E31Q/D54C/A61C, 4C S/E31Q/A126C/K139C, 4CS/N14W/E31Q, 4CS/E31Q/D146Y, 4CS/E31Q/D146L, 4C S/E31Q/D146F, 4C S/E31Q/Q103L, 4CS/E31Q/Q103I, 4CS/E31Q/M150F, 4CS/Q18L/E31Q, 4CS/E31Q/S68Y, 4CS/E31Q/S38Q, 4C S/E31Q/S38R, 4CS/E31Q/S68D, 4CS/S7P/E31Q, 4CS/V11I/E31Q, 4CS/D23N/E31Q, 4CS/D23S/E31Q, 4CS/R27Q/E31Q, 4CS/L29V/E31Q, 4CS/E31Q/T34P, 4CS/E31Q/R39T, 4CS/E31Q/R39S, 4CS/E31Q/R44Q, 4CS/E31Q/I46V, 4CS/E31Q/S50Y, 4CS/E31Q/Q56L, 4CS/E31Q/Q56L/P57T, 4C S/E31Q/P57T, 4CS/E31Q/P57V, 4CS/E31Q/M60L, 4CS/E31Q/K67Q, 4CS/E31Q/E69K, 4CS/E31Q/I71M, 4CS/E31Q/E77K, 4CS/E31Q/I80T, 4CS/E31Q/I81V, 4CS/E31Q/I81L, 4C S/E31Q/N87S, 4CS/E31Q/D90E, 4CS/E31Q/K93D/T95E, 4CS/E31Q/K93N/T95E, 4CS/E31Q/T95E, 4CS/E31Q/K96G, 4CS/E31Q/S97N, 4CS/E31Q/N111D, 4CS/E31QN1113I, 4CS/E31Q/S119L, 4CS/E31Q/L144N, 4CS/E31Q/R147K, 4CS/E31Q/I149V, 4CS/E31Q/M150T, 4CS/E31Q/E156Q/D157N, 4CS/K53S, 4CS/K53G, 4CS/K53T, 4CS/K53I, 4CS/K53L, 4CS/K53N, 4CS/K53D, 4CS/M51K, 4CS/M51Q, 4CS/M51I, 4CS/S55N, 4CS/S55Q, 4CS/Q56L, 4CS/Q56I, 4CS/P57A, 4CS/P57E, 4CS/M60L, 4CS/M60I, 4CS/K8Y, 4CS/K8Q, 4CS/K8E, 4CS/H109W, 4CS/H109Y, 4CS/E31Q/S38E, 4CS/E31Q/S38L, 4CS/E31Q/S38I, 4C S/E31Q/S38V, 4C S/E31Q/S68N, 4CS/E31Q/S68E, 4CS/E31Q/S68Q, 4C S/E31Q/S76C, 4C S/E31Q/S127D, 4CS/E31Q/S127E, 4CS/D23N/E31Q/R27Q, 4CS/E31Q/Q56L/T95E, 4CS/E31Q/K96Q/S119L, 4CS/E31Q/E141K/I149V, 4CS/E31Q/E141Q/I149V, 4CS/S7P/E31Q/S50Y, 4CS/E31Q/I80T/I81L/delD193, 4CS/E31Q/P57A/S119L/delD193, 4CS/E31Q/P57A/I80T/I81L/S119L/delD193, 4CS/E31Q/P57A/K93D/T95E/S119L/delD193, 4CS/E31Q/I80T/S119L/delD193, 4CS/E31Q/I80T/I81L/K93D/T95E/delD193, 4CS/E31Q/P57A/I80T/I81L/K93D/T95E/S119L/delD193, 4CS/S7C/E31Q/S50C/delD193, 4CS/S7C/E31Q/S50C/P57A/delD193, 4CS/S7C/E31Q/S50C/S119L/delD193, 4CS/S7C/E31Q/S50C/I80T/delD193, 4CS/S7C/E31Q/S50C/I80T/S119L/delD193, 4CS/S7C/E31Q/S50C/P57A/I80T/S119L/delD193, 4CS/S10C/E31Q/N155C/delD193, 4CS/S10C/E31Q/P57A/N155C/delD193, 4CS/S10C/E31Q/S119L/N155C/delD193, 4CS/S10C/E31Q/I80T/N155C/delD193, 4C S/S10C/E31Q/I80T/S119L/N155C/delD193, 4CS/S10C/E31Q/P57A/I80T/S119L/N155C/delD193, 4C S/S10C/E31Q/I49C/delD193, 4CS/L15C/E31Q/R147C/delD193, 4CS/E31Q/T63C/P88C/delD193, 4CS/N14C/E31Q/S127C/delD193, 4CS/E31Q/S38R/S127W/delD193, 4CS/S10C/D35E/N155C, 4CS/S10C/S36D/N155C, 4CS/S10C/S36N/N155C, 4CS/S10C/K53V/N155C, 4CS/S10C/K53Y/N155C, 4CS/S10C/K53F/N155C, 4CS/S10C/M51R/N155C, 4CS/S10C/M51L/N155C, 4C S/S10C/M51H/N155C, 4C S/S10C/M51F/N155C, 4CS/S10C/M51Y/N155C, 4CS/S10C/S55D/N155C, 4CS/S10C/S55E/N155C, 4CS/S10C/S55T/N155C, 4CS/S10C/P57Q/N155C, 4CS/S10C/P57D/N155C, 4CS/S10C/P57Y/N155C, 4CS/S10C/P57N/N155C, 4CS/S10C/M60Y/N155C, 4CS/S10C/M60F/N155C, 4CS/S10C/D110Q/N155C, 4CS/S10C/D110R/N155C, 4CS/S10C/N111D/N155C, 4CS/S10C/N111S/N155C, 4CS/S10C/N111T/N155C, 4CS/S10C/N111E/N155C, 4CS/S10C/D132Q/N155C, 4CS/S10C/D132EN155C, 4CS/E6Q/S10C/K53D/N155C, 4C S/E6Q/S10C/M51K/K53D/N155C, 4CS/S10C/E31Q/D35N/N41Q/K53A/N155C, 4CS/S10C/E31Q/N41Q/K53A/N155C, 4CS/S10C/E31Q/K53A/N155C, 4CS/S10C/K53T/N155C, 4CS/S10C/P57A/N155C, 4CS/S10C/N155C, 4CS/S10C/S76G/N155C, 4CS/S10C/S76A/N155C, 4CS/S10C/M51K/K53D/N155C, 4CS/S10C/M51K/K53E/N155C, 4CS/E6Q/S10C/K53E/N155C, 4CS/E6Q/S10C/M51K/K53E/N155C, 4CS/E6Q/S10C/M51K/P57E/N155C, 4CS/S10C/M51K/P57E/N155C, 4CS/E6Q/S10C/P57E/N155C, 4CS/S10C/E31Q/K53T/N155C, 4CS/S10C/K53G/P57E/N155C, 4CS/S10C/K53T/P57E/N155C, 4CS/S10C/K53A/P57E/N155C, 4CS/S10C/P57E/N155C, 4CS/S10C/K53D/N155C, 4CS/S10C/E31Q/N41Q/N155C, 4CS/S10C/K53A/N155C, 4CS/S10C/K53G/N155C, 4CS/S10C/K53E/N155C, 4CS/S10C/K53S/N155C, 4CS/S10C/M51L/K53D/N155C, 4CS/S10C/K53D/D110R/N155C, 4CS/S10C/K53D/N111T/N155C, 4CS/S10C/K53D/S55T/N155C, 4CS/S10C/K53D/S55T/D110R/N155C, 4CS/S10C/M51L/K53D/S55T/D110R/N111T/N155C, 4CS/S10C/M51L/K53D/S55T/D110R/N155C, 4CS/S10C/K53D/S55T/D110R/N111T/N155C, 4CS/S10C/K53D/S55T/N111T/N155C, 4CS/S10C/E31Q/D35N/N155C, 4CS/S10C/N41Q/N155C, 4CS/S10C/D35N/N155C, 4CS/S10C/D37N/N155C, 4CS/S10C/E31Q/D37N/N155C, 4CS/S10C/D35N/D37N/N155C, 4CS/E6Q/S10C/M51L/K53D/S55T/D110R/N111T/N155C, 4CS/S10C/K53D/H109Y/N155C, 4CS/S10C/D37N/K53D/N155C, 4CS/S10C/D35N/K53D/N155C, 4CS/K8E/S10C/K53D/N155C, 4CS/S10C/E31Q/K53D/N155C, 4CS/S10C/N41Q/K53D/N155C, 4CS/S10C/K53D/P57V/N155C, 4CS/S10C/K53D/P57T/N155C, 4CS/E6Q/S10C/K53D/N111T/N155C, E6A/K53A, D35N/K53A, N41Q/K53A, D35N/N41Q/K53A, D35N/N41Q, D37N/K53A, E6Q/K53D, E6Q/M51K/K53D, M51K/K53D, M51K/K53E, E6Q/K53E, E6Q/M51K/K53E, E6Q/M51K/P57E, M51K/P57E, E6Q/P57E, K53G/P57E, K53T/P57E, K53A/P57E, M51L/K53D, K53D/D110R, K53D/N111T, K53D/S55T, K53D/S55T/D110R, M51L/K53D/S55T/D110R/N111T, M51L/K53D/S55T/D110R, K53D/S55T/D110R/N111T, K53D/S55T/N111T, D35N/D37N, E6Q/M51L/K53D/S55T/D110R/N111T, K53D/H109Y, D37N/K53D, D35N/K53D, K8E/K53D, N41Q/K53D, K53D/P57V, K53D/P57T, E6Q/K53D/N111T, Q56L/P57T, K93D/T95E, K93N/T95E, E156Q/D157N, D23N/R27Q, Q56L/T95E, K96Q/S119L, E141K/I149V, E141Q/I149V, S7P/S50Y, I80T/I81L, P57A/S119L, P57A/I80T/I81L/S119L, P57A/K93D/T95E/S119L, I80T/S119L, I80T/I81L/K93D/T95E, P57A/180T/I81L/K93D/T95E/S119L, P57A/180T/S119L, N14C/S127C, M33C/S38C, S76C/L138C, S10C/I49C, L15C/R147C, P28C/L136C, S50C/P88C, T63C/P88C, V62C/Q103C, S10C/N155C, S65C/P88C, S7C/S50C, D54C/A61C, A126C/K139C, C38R/C127W, E31Q/K53A, E31Q/D35N/K53A, E31Q/N41Q/K53A, E31Q/D35N/N41Q/K53A, E31Q/D35N, E31Q/N41Q, E31Q/D35N/N41Q, E31Q/D37N, E31Q/D37N/K53A, S10C/E31Q/I49C, L15C/E31Q/R147C, P28C/E31Q/L136C, E31Q/S50C/P88C, E31Q/T63C/P88C, E31Q/V62C/Q103C, S10C/E31Q/N155C, E31Q/S65C/P88C, S7C/E31Q/S50C, E31Q/D54C/A61C, E31Q/A126C/K139C, N14W/E31Q, E31Q/D146Y, E31Q/D146L, E31Q/D146F, E31Q/Q103L, E31Q/Q103I, E31Q/M150F, Ql8L/E31Q, S7P/E31Q, V11I/E31Q, D23N/E31Q, D23S/E31Q, R27Q/E31Q, L29V/E31Q, E31Q/T34P, E31Q/R39T, E31Q/R39S, E31Q/R44Q, E31Q/I46V, E31Q/S50Y, E31Q/Q56L, E31Q/Q56L/P57T, E31Q/P57T, E31Q/P57V, E31Q/M60L, E31Q/K67Q, E31Q/E69K, E31Q/I71M, E31Q/E77K, E31Q/I80T, E31Q/I81V, E31Q/I81L, E31Q/N87S, E31Q/D90E, E31Q/K93D/T95E, E31Q/K93N/T95E, E31Q/T95E, E31Q/K96G, E31Q/S97N, E31Q/N111D, E31Q/M1131, E31Q/S119L, E31Q/L144N, E31Q/R147K, E31Q/I149V, E31Q/M150T, E31Q/E156Q/D157N, D23N/E31Q/R27Q, E31Q/Q56L/T95E, E31Q/K96Q/S119L, E31Q/E141K/I149V, E31Q/E141Q/I149V, S7P/E31Q/S50Y, E31Q/180T/181L/delD193, E31Q/P57A/S119L/delD193, E31Q/P57A/180T/181L/S119L/delD193, E31Q/P57A/K93D/T95E/S119L/delD193, E31Q/I80T/S119L/delD193, E31Q/I80T/I81L/K93D/T95E/delD193, E31Q/P57A/180T/181L/K93D/T95E/S119L/delD193, S7C/E31Q/S50C/delD193, S7C/E31Q/S50C/P57A/delD193, S7C/E31Q/S50C/S119L/delD193, S7C/E31Q/S50C/I80T/delD193, S7C/E31Q/S50C/I80T/S119L/delD193, S7C/E31Q/S50C/P57A/I80T/S 119L/delD193, S10C/E31Q/N155C/delD193, S10C/E31Q/P57A/N155C/delD193, S10C/E31Q/S119L/N155C/delD193, S10C/E31Q/I80T/N155C/delD193, S10C/E31Q/I80T/S119L/N155C/delD193, S10C/E31Q/P57A/I80T/S119L/N155C/delD193, S10C/E31Q/I49C/delD193, L15C/E31Q/R147C/delD193, E31Q/T63C/P88C/delD193, S10C/D35E/N155C, S10C/S36D/N155C, S10C/S36N/N155C, S10C/K53V/N155C, S10C/K53Y/N155C, S10C/K53F/N155C, S10C/M51R/N155C, S10C/M51L/N155C, S10C/M51H/N155C, S10C/M51F/N155C, S10C/M51Y/N155C, S10C/S55D/N155C, S10C/S55E/N155C, S10C/S55T/N155C, S10C/P57Q/N155C, S10C/P57D/N155C, S10C/P57Y/N155C, S10C/P57N/N155C, S10C/M60Y/N155C, S10C/M60F/N155C, S10C/D110Q/N155C, S10C/D110R/N155C, S10C/N111D/N155C, S10C/N111S/N155C, S10CN111T/N155C, S10C/N111E/N155C, S10C/D132Q/N155C, S10C/D132E/N155C, E6Q/S10C/K53D/N155C, E6Q/S10C/M51K/K53D/N155C, S10C/E31Q/D35N/N41Q/K53A/N155C, S10C/E31Q/N41Q/K53A/N155C, S10C/E31Q/K53A/N155C, S10C/K53T/N155C, S10C/P57A/N155C, S10C/M51K/K53D/N155C, S10C/M51K/K53E/N155C, E6Q/S10C/K53E/N155C, E6Q/S10C/M51K/K53E/N155C, E6Q/S10C/M51K/P57E/N155C, S10C/M51K/P57E/N155C, E6Q/S10C/P57E/N155C, S10C/E31Q/K53T/N155C, S10C/K53G/P57E/N155C, S10C/K53T/P57E/N155C, S10C/K53A/P57E/N155C, S10C/P57E/N155C, S10C/K53D/N155C, S10C/E31Q/N41Q/N155C, S10C/K53A/N155C, S10C/K53G/N155C, S10C/K53E/N155C, S10C/K53S/N155C, S10C/M51L/K53D/N155C, S10C/K53D/D110R/N155C, S10C/K53D/N111TN155C, S10C/K53D/S55T/N155C, S10C/K53D/S55T/D110R/N155C, S10C/M51L/K53D/S55T/D110R/N111T/N155C, S10C/M51L/K53D/S55T/D110R/N155C, S10C/K53D/S55T/D110R/N111T/N155C, S10C/K53D/S55T/N111T/N155C, S10C/E31Q/D35N/N155C, S10C/N41Q/N155C, S10C/D35N/N155C, S10C/D37N/N155C, S10C/E31Q/D37N/N155C, S10C/D35N/D37N/N155C, E6Q/S10C/M51L/K53D/S55T/D110R/N111TN155C, S10C/K53D/H109Y/N155C, S10C/D37N/K53D/N155C, S10C/D35N/K53D/N155C, K8E/S10C/K53D/N155C, S10C/E31Q/K53D/N155C, S10C/N41Q/K53DN155C, S10C/K53D/P57V/N155C, S10C/K53D/P57T/N155C, or E6Q/S10C/K53D/N111T/N155C.

[0257] In some embodiments, the IL18 variant of the IL18-Fc fusion protein includes one or more amino acid substitutions provided in FIGS. 13A-13B, 14, 15A-15D, 16A-16E, 17A-17B, 18, 19A-19P, 20A-20D, 31, 36, 37, 39A-39B, 40, 41A-41C, 42A-42D, 43A-13B, 44A-44C, 45, 46, 47, 48, 51, 54, and 62. In some embodiments, the IL18 variant of the IL18-Fc fusion protein is depicted in any one of FIGS. 13A-13B, 14, 15A-15D, 16A-16E, 17A-B, 18, 19A-19P, 20A-20D, 41A-41C, 42A-42D, 43A-13B, and 44A-44C. In certain embodiments, the IL18 variant includes an amino acid sequence set forth in SEQ ID NOS:84-238 and 799-949.

[0258] Any Fc domains can be included in the monovalent IL18-Fc fusion protein, including the wildtype and variant Fc domains described herein. In some embodiments, each Fc domain includes a CH2 and CH3. In some embodiments, the first and second Fc domains include a hinge, CH2 and CH3. In one embodiment, the first and second Fc domains each have the formula, from N-terminus to C-terminus, hinge-CH2-CH3. In some embodiments, the first and second Fc domains of the monovalent IL18-Fc fusion protein are heterodimeric. Modifications for such Fc domains are described in Section III above.

[0259] In an exemplary embodiments, the monovalent IL18-Fc fusion protein is heterodimeric. In some embodiments, the first and second Fc domains include the amino acid substitution set L368D/K370S: S364K/E357Q. In some embodiments, the L368D/K370S modifications are in the first Fc domain and the S364K/E357Q modifications are in the second domain. In certain heterodimeric embodiments, the first Fc domain includes isosteric pI variants Q295E/N384D/Q418E/N421D. In some embodiments, the first Fc domain and the second Fc domain each include K447del modifications. In some embodiments, a IL18 protein or variant thereof is connected to the first Fc domain.

[0260] In certain embodiments, both the first and second Fc domains include FcKO variants: E233P/L234V/L235A/G236del/S267K, according to the EU numbering.

[0261] In some embodiments, the first monomer includes a first Fc domain with heterodimer skew variants L368D/K370S, isosteric pI variants Q295E/N384D/Q418E/N421D, and FcKO variants E233P/L234V/L235A/G236del/S267K and the second monomer includes a second Fc domain with heterodimer skew variants S364K/E357Q and FcKO variants E233P/L234V/L235A/G236del/S267K, according to the EU index. In some embodiments, the first and second monomers each also include M428L/N434S half-life extension variants. In some embodiments, a IL18 protein or variant thereof is connected to the first Fc domain.

[0262] In some embodiments, the first and second monomers each also include a C220S hinge amino acid substitution. In some embodiments, the first and second monomers each also include a N297A or N297S amino acid substitution that removes glycosylation. In some embodiments, the first monomer includes a first Fc domain with modifications C220 S/E233P/L234V/L235A/G236del/S267K/Q295E/L368D/K370 S/384D/Q418E/N421D and optionally M428L/N434S and the second monomer includes a second Fc domain with modifications C220S/E233P/L234V/L235A/G236del/S267K/S364K/E357Q and optionally modifications M428L/N434S, according to the EU numbering. In some embodiments, a IL18 protein or variant thereof is connected to the first Fc domain.

[0263] FIGS. 21A-21M depict amino acid modifications in the first and second monomers of a heterodimeric monovalent IL18-Fc fusion protein. Additional, exemplary Fc domain “backbone sequences” that find use in the subject monovalent IL18-Fc fusion proteins are depicted in FIGS. 9A-9D and 10.

[0264] In the formulas above, “IL18” is any IL18 provided herein (see, e.g., wildtype or variant IL18 depicted in FIGS. 13A-13B, 14, 15A-15D, 16A-16E, 17A-17B, 18, 19A-19P, 20A-20D, 41A-41C, 42A-42D, 43A-13B, and 44A-44C), “Fc domain” refers to any Fc domain provided herein (e.g., wildtype or variant Fc domains provided herein), and “linker” refers to any linker provided herein (see, e.g., FIG. 8). Further, “N” and “C” refer to the N-terminal and C-terminal orientation of each component in the second monomer. In such embodiments, the first monomer only includes an Fc domain (i.e., an “empty Fc domain”). In some embodiments, the each of the first and second Fc domains have the formula N-hinge-CH2-CH3-C. In certain embodiments, each of the first and second Fc domains have the formula N-CH2-CH3-C.

[0265] Exemplary monovalent IL18 fusion proteins include XENP30792, XENP31296, XENP31812, XENP31813, XENP31814, XENP34106, XENP34107, XENP34108, XENP34109, XENP34110, XENP34111, XENP34112, XENP34113, XENP34114, XENP34281, XENP37825, XENP37826, XENP38869, XENP39138, XENP39139, XENP39140, XENP39141, XENP39142, XENP39149, XENP39150, XENP39151, XENP39152, XENP39672, XENP39804, XENP39805, XENP40024, XENP40025, XENP40685, XENP40962, XENP40963, XENP40964, XENP40965, XENP40966, XENP40967, XENP40968, XENP41756, XENP71757, XENP41758, XENP41759, XENP41760, XENP41761, XENP41762, XENP41763, XENP41764, XENP41675, XENP41676, XENP41677, XENP41678, XENP41679, XENP41770, XENP41974, XENP41975, XENP42003, XENP42007, XENP42008, XENP42009, XENP42010, XENP42011, XENP42012, XENP42141, XENP42142, XENP42143, XENP42144, XENP42145, XENP42146, XENP42147, and XENP42148, as shown in FIGS. 21A-21M and the corresponding sequences (see, e.g., SEQ ID NOS:239-292 and 960-1039).

[0266] B. IL18 x Fab-Fc Fusion Proteins

[0267] In some embodiments, the IL18 fusion is IL18 x Fab-Fc fusion protein that includes (a) a first monomer comprising a variable heavy (VH) region covalently attached to the N-terminus of a first heterodimeric Fc chain, (b) a second monomer comprising an IL18 protein or variant thereof covalently attached to the N-terminus of a complementary second heterodimeric Fc chain (optionally via a domain linker), and (c) a third monomer that is a corresponding light chain that forms a Fab with the first monomer. The Fc chain of the first monomer and the Fc chain of the second monomer form a heterodimeric Fc complex. See, the schematic diagram in FIG. 12B and the amino acid sequences of FIGS. 22A-22CZ.

[0268] Any of the IL18s described herein can be included in the monovalent IL18-Fc fusion protein. In some embodiments, the IL18 is wildtype mature human IL18 (FIG. 1A). In certain embodiments, the IL18 is a variant IL18 that includes one or more modifications as depicted in FIGS. 13A-13B, 14, 15A-15D, 16A-16E, 17A-17B, 18, 19A-19P, 20A-20D, 31, 36, 37, 39A-39B, 40, 41A-41C, 42A-42D, 43A-13B, 44A-44C, 45, 46, 47, 48, 51, 54, and 62. In some embodiments, one or more residues of IL18 selected from Y1, E6, S7, K8, S10, V11, N14, L15, D17, Q18, D23, R27, P28, L29, E31, M33, T34, D35, S36, D37, C38, R39, D40, N41, R44, I46, I49, S50, M51, K53, D54, S55, Q56, P57, M60, A61, V62, T63, S65, K67, C68, E69, I71, C76, E77, I80, I81, N87, P88, D90, K93, T95, K96, S97, Q103, H109, D110, N111, M113, S119, A126, C127, D132, L136, L138, K139, E141, L144, D146, R147, I149, M150, N155, E156, and D157 are modified. In some embodiments, the IL18 of the IL18 x Fab-Fc fusion proteins is a variant IL18 that includes one or more modifications (e.g., substitutions or deletions) selected from Y1F, Y1H, E6A, E6Q, S7C, S7P, K8E, K8Q, K8Y, S10C, V11I, N14C, N14W, L15C, D17N, Q18L, D23N, D23S, R27Q, P28C, L29V, E31Q, M33C, T34P, D35N, D35E, S36D, S36N, D37N, C38S, C38Q, C38R, C38E, C38L, C38I, C38V, C38K, C38D, R39S, R39T, D40N, N41Q, R44Q, I46V, I49C, S50C, S50Y, M51I, M51K, M51Q, M51R, M51L, M51H, M51F, M51Y, K53A, K53D, K53E, K53G, K53H, K53I, K53L, K53M, K53N, K53Q, K53R, K53S, K53T, K53V, K53Y, K53F, D54C, S55N, S55Q, S55D, S55E, S55T, Q56I, Q56L, P57A, P57E, P57T, P57V, P57Q, P57D, P57Y, P57N, M60I, M60L, M60K, M60Y, M60F, A61C, V62C, T63C, S65C, K67Q, C68S, C68I, C68F, C68Y, C68D, C68N, C68E, C68Q, C68K, E69K, I71M, C76S, C76E, C76K, E77K, 180T, I81L, I81V, N87S, P88C, D90E, K93D, K93N, T95E, K96G, K96Q, S97N, Q103C, Q103E, Q103I, Q103L, H109W, H109Y, D110N, D110Q, D110R, N111D, N111Q, N111S, N111T, N111E, M113I, S119L, A126C, C127S, C127W, C127Y, C127F, C127D, C127E, C127K, D132Q, D132E, L136C, L138C, K139C, E141K, E141Q, L144N, D146F, D146L, D146Y, R147C, R147K, I149V, M150F, M150T, N155C, E156Q, D157A, D157S, D157N, and D157del. In some embodiments, the IL18 variant includes a 4CS substitution (C38S/C68S/C76S/C127S substitutions) and one or more of additional substitutions including S38C, S38E, S38L, S38Q, S38R, S38V, S38K, S38D, S68C, S68D, S68E, S68F, S68I, S68N, S68Q, S68Y, S68K, S76C, S76E, S76K, S127C, S127D, S127F, S127W, S127K, and S127Y. In some embodiments, the amino acid substitution can include 4CS, 4CS/D193S, 4CS/D193A, 4CS/delD193, 4CS/S38E, 4CS/S68E, 4CS/S76E, 4CS/S127E, 4CS/S38K, 4CS/S68K, 4CS/S76K, 4CS/S127K, 4CS/S38D, 4CS/Y1F, 4CS/Y1H, 4CS/E6A, 4CS/E6Q, 4CS/D17N, 4CS/E31Q, 4CS/D35N, 4CS/D37N, 4CS/D40N, 4CS/N41Q, 4CS/K53R, 4CS/K53H, 4CS/K53M, 4CS/K53E, 4CS/K53Q, 4CS/K53A, 4CS/Q103E, 4CS/D110N, 4CS/N111Q, 4C S/E6A/K53A, 4CS/N14C/E31Q/S127C, 4C S/E31Q/K53A, 4CS/E31Q/D35N/K53A, 4CS/E31Q/N41Q/K53A, 4CS/E31Q/D35N/N41Q/K53A, 4CS/E31Q/D35N, 4CS/E31Q/N41Q, 4C S/E31Q/D35N/N41Q, 4C S/E31Q/D37N, 4CS/E31Q/D37N/K53A, 4CS/E31Q/M33C/S38C, 4C S/E31Q/S76C/L138C, 4CS/E31Q/568I, 4CS/E31Q/S68F, 4CS/E31Q/S127W, 4CS/E31Q/S127Y, 4CS/E31Q/S127F, 4CS/S10C/E31Q/149C, 4C S/L15C/E31Q/R147C, 4C S/P28C/E31Q/L136C, 4CS/E31Q/S50C/P88C, 4CS/E31Q/T63C/P88C, 4C S/E31Q/V62C/Q103C, 4CS/S10C/E31Q/N155C, 4CS/E31Q/S65C/P88C, 4CS/S7C/E31Q/S50C, 4CS/E31Q/D54C/A61C, 4C S/E31Q/A126C/K139C, 4CS/N14W/E31Q, 4CS/E31Q/D146Y, 4CS/E31Q/D146L, 4C S/E31Q/D146F, 4C S/E31Q/Q103L, 4CS/E31Q/Q103I, 4CS/E31Q/M150F, 4C S/Q18L/E31Q, 4CS/E31Q/S68Y, 4CS/E31Q/S38Q, 4C S/E31Q/S38R, 4CS/E31Q/S68D, 4CS/S7P/E31Q, 4CS/V11I/E31Q, 4CS/D23N/E31Q, 4CS/D23S/E31Q, 4CS/R27Q/E31Q, 4CS/L29V/E31Q, 4CS/E31Q/T34P, 4CS/E31Q/R39T, 4CS/E31Q/R39S, 4CS/E31Q/R44Q, 4CS/E31Q/I46V, 4CS/E31Q/S50Y, 4CS/E31Q/Q56L, 4CS/E31Q/Q56L/P57T, 4C S/E31Q/P57T, 4CS/E31Q/P57V, 4CS/E31Q/M60L, 4CS/E31Q/K67Q, 4CS/E31Q/E69K, 4CS/E31Q/I71M, 4CS/E31Q/E77K, 4CS/E31Q/I80T, 4CS/E31Q/I81V, 4CS/E31Q/I81L, 4C S/E31Q/N87S, 4CS/E31Q/D90E, 4CS/E31Q/K93D/T95E, 4CS/E31Q/K93N/T95E, 4CS/E31Q/T95E, 4CS/E31Q/K96G, 4CS/E31Q/S97N, 4CS/E31Q/N111D, 4CS/E31QN1113I, 4CS/E31Q/S119L, 4CS/E31Q/L144N, 4CS/E31Q/R147K, 4CS/E31Q/I149V, 4CS/E31Q/M150T, 4CS/E31Q/E156Q/D157N, 4CS/K53S, 4CS/K53G, 4CS/K53T, 4CS/K53I, 4CS/K53L, 4CS/K53N, 4CS/K53D, 4CS/M51K, 4CS/M51Q, 4CS/M51I, 4CS/S55N, 4CS/S55Q, 4CS/Q56L, 4CS/Q56I, 4CS/P57A, 4CS/P57E, 4CS/M60L, 4CS/M60I, 4CS/K8Y, 4CS/K8Q, 4CS/K8E, 4CS/H109W, 4CS/H109Y, 4CS/E31Q/S38E, 4CS/E31Q/S38L, 4CS/E31Q/S38I, 4C S/E31Q/S38V, 4C S/E31Q/S68N, 4CS/E31Q/S68E, 4CS/E31Q/S68Q, 4C S/E31Q/S76C, 4C S/E31Q/S127D, 4CS/E31Q/S127E, 4CS/D23N/E31Q/R27Q, 4CS/E31Q/Q56L/T95E, 4CS/E31Q/K96Q/S119L, 4CS/E31Q/E141K/I149V, 4CS/E31Q/E141Q/I149V, 4CS/S7P/E31Q/S50Y, 4CS/E31Q/I80T/I81L/delD193, 4CS/E31Q/P57A/S119L/delD193, 4CS/E31Q/P57A/I80T/I81L/S119L/delD193, 4CS/E31Q/P57A/K93D/T95E/S119L/delD193, 4CS/E31Q/I80T/S119L/delD193, 4CS/E31Q/I80T/I81L/K93D/T95E/delD193, 4CS/E31Q/P57A/I80T/I81L/K93D/T95E/S119L/delD193, 4CS/S7C/E31Q/S50C/delD193, 4CS/S7C/E31Q/S50C/P57A/delD193, 4CS/S7C/E31Q/S50C/S119L/delD193, 4CS/S7C/E31Q/S50C/I80T/delD193, 4CS/S7C/E31Q/S50C/I80T/S119L/delD193, 4CS/S7C/E31Q/S50C/P57A/I80T/S119L/delD193, 4CS/S10C/E31Q/N155C/delD193, 4CS/S10C/E31Q/P57A/N155C/delD193, 4CS/S10C/E31Q/S119L/N155C/delD193, 4CS/S10C/E31Q/I80T/N155C/delD193, 4C S/S10C/E31Q/I80T/S119L/N155C/delD193, 4CS/S10C/E31Q/P57A/I80T/S119L/N155C/delD193, 4C S/S10C/E31Q/I49C/delD193, 4CS/L15C/E31Q/R147C/delD193, 4CS/E31Q/T63C/P88C/delD193, 4CS/N14C/E31Q/S127C/delD193, 4CS/E31Q/S38R/S127W/delD193, 4CS/S10C/D35E/N155C, 4CS/S10C/S36D/N155C, 4CS/S10C/S36N/N155C, 4CS/S10C/K53V/N155C, 4CS/S10C/K53Y/N155C, 4CS/S10C/K53F/N155C, 4CS/S10C/M51R/N155C, 4CS/S10C/M51L/N155C, 4C S/S10C/M51H/N155C, 4C S/S10C/M51F/N155C, 4CS/S10C/M51Y/N155C, 4CS/S10C/S55D/N155C, 4CS/S10C/S55E/N155C, 4CS/S10C/S55T/N155C, 4CS/S10C/P57Q/N155C, 4CS/S10C/P57D/N155C, 4CS/S10C/P57Y/N155C, 4CS/S10C/P57N/N155C, 4CS/S10C/M60Y/N155C, 4CS/S10C/M60F/N155C, 4CS/S10C/D110Q/N155C, 4CS/S10C/D110R/N155C, 4CS/S10C/N111D/N155C, 4CS/S10C/N111S/N155C, 4CS/S10C/N111T/N155C, 4CS/S10C/N111E/N155C, 4CS/S10C/D132Q/N155C, 4CS/S10C/D132EN155C, 4CS/E6Q/S10C/K53D/N155C, 4C S/E6Q/S10C/M51K/K53D/N155C, 4CS/S10C/E31Q/D35N/N41Q/K53A/N155C, 4CS/S10C/E31Q/N41Q/K53A/N155C, 4CS/S10C/E31Q/K53A/N155C, 4CS/S10C/K53T/N155C, 4CS/S10C/P57A/N155C, 4CS/S10C/N155C, 4CS/S10C/S76G/N155C, 4CS/S10C/S76A/N155C, 4CS/S10C/M51K/K53D/N155C, 4CS/S10C/M51K/K53E/N155C, 4CS/E6Q/S10C/K53E/N155C, 4CS/E6Q/S10C/M51K/K53E/N155C, 4CS/E6Q/S10C/M51K/P57E/N155C, 4CS/S10C/M51K/P57E/N155C, 4CS/E6Q/S10C/P57E/N155C, 4CS/S10C/E31Q/K53T/N155C, 4CS/S10C/K53G/P57E/N155C, 4CS/S10C/K53T/P57E/N155C, 4CS/S10C/K53A/P57E/N155C, 4CS/S10C/P57E/N155C, 4CS/S10C/K53D/N155C, 4CS/S10C/E31Q/N41Q/N155C, 4CS/S10C/K53A/N155C, 4CS/S10C/K53G/N155C, 4CS/S10C/K53E/N155C, 4CS/S10C/K53S/N155C, 4CS/S10C/M51L/K53D/N155C, 4CS/S10C/K53D/D110R/N155C, 4CS/S10C/K53D/N111T/N155C, 4CS/S10C/K53D/S55T/N155C, 4CS/S10C/K53D/S55T/D110R/N155C, 4CS/S10C/M51L/K53D/S55T/D110R/N111T/N155C, 4CS/S10C/M51L/K53D/S55T/D110R/N155C, 4CS/S10C/K53D/S55T/D110R/N111T/N155C, 4CS/S10C/K53D/S55T/N111T/N155C, 4CS/S10C/E31Q/D35N/N155C, 4CS/S10C/N41Q/N155C, 4CS/S10C/D35N/N155C, 4CS/S10C/D37N/N155C, 4CS/S10C/E31Q/D37N/N155C, 4CS/S10C/D35N/D37N/N155C, 4CS/E6Q/S10C/M51L/K53D/S55T/D110R/N111T/N155C, 4CS/S10C/K53D/H109Y/N155C, 4CS/S10C/D37N/K53D/N155C, 4CS/S10C/D35N/K53D/N155C, 4CS/K8E/S10C/K53D/N155C, 4CS/S10C/E31Q/K53D/N155C, 4CS/S10C/N41Q/K53D/N155C, 4CS/S10C/K53D/P57V/N155C, 4CS/S10C/K53D/P57T/N155C, 4CS/E6Q/S10C/K53D/N111T/N155C, E6A/K53A, D35N/K53A, N41Q/K53A, D35N/N41Q/K53A, D35N/N41Q, D37N/K53A, E6Q/K53D, E6Q/M51K/K53D, M51K/K53D, M51K/K53E, E6Q/K53E, E6Q/M51K/K53E, E6Q/M51K/P57E, M51K/P57E, E6Q/P57E, K53G/P57E, K53T/P57E, K53A/P57E, M51L/K53D, K53D/D110R, K53D/N111T, K53D/S55T, K53D/S55T/D110R, M51L/K53D/S55T/D110R/N111T, M51L/K53D/S55T/D110R, K53D/S55T/D110R/N111T, K53D/S55T/N111T, D35N/D37N, E6Q/M51L/K53D/S55T/D110R/N111T, K53D/H109Y, D37N/K53D, D35N/K53D, K8E/K53D, N41Q/K53D, K53D/P57V, K53D/P57T, E6Q/K53D/N111T, Q56L/P57T, K93D/T95E, K93N/T95E, E156Q/D157N, D23N/R27Q, Q56L/T95E, K96Q/S119L, E141K/I149V, E141Q/I149V, S7P/S50Y, I80T/I81L, P57A/S119L, P57A/I80T/I81L/S119L, P57A/K93D/T95E/S119L, I80T/S119L, I80T/I81L/K93D/T95E, P57A/I80T/I81L/K93D/T95E/S119L, P57A/I80T/S119L, N14C/S127C, M33C/S38C, S76C/L138C, S10C/I49C, L15C/R147C, P28C/L136C, S50C/P88C, T63C/P88C, V62C/Q103C, S10C/N155C, S65C/P88C, S7C/S50C, D54C/A61C, A126C/K139C, C38R/C127W, E31Q/K53A, E31Q/D35N/K53A, E31Q/N41Q/K53A, E31Q/D35N/N41Q/K53A, E31Q/D35N, E31Q/N41Q, E31Q/D35N/N41Q, E31Q/D37N, E31Q/D37N/K53A, S10C/E31Q/I49C, L15C/E31Q/R147C, P28C/E31Q/L136C, E31Q/S50C/P88C, E31Q/T63C/P88C, E31Q/V62C/Q103C, S10C/E31Q/N155C, E31Q/S65C/P88C, S7C/E31Q/S50C, E31Q/D54C/A61C, E31Q/A126C/K139C, N14W/E31Q, E31Q/D146Y, E31Q/D146L, E31Q/D146F, E31Q/Q103L, E31Q/Q103I, E31Q/M150F, Ql8L/E31Q, S7P/E31Q, V11I/E31Q, D23N/E31Q, D23 S/E31Q, R27Q/E31Q, L29V/E31Q, E31Q/T34P, E31Q/R39T, E31Q/R39S, E31Q/R44Q, E31Q/I46V, E31Q/S50Y, E31Q/Q56L, E31Q/Q56L/P57T, E31Q/P57T, E31Q/P57V, E31Q/M60L, E31Q/K67Q, E31Q/E69K, E31Q/I71M, E31Q/E77K, E31Q/I80T, E31Q/I81V, E31Q/I81L, E31Q/N87S, E31Q/D90E, E31Q/K93D/T95E, E31Q/K93N/T95E, E31Q/T95E, E31Q/K96G, E31Q/S97N, E31Q/N111D, E31Q/M1131, E31Q/S119L, E31Q/L144N, E31Q/R147K, E31Q/I149V, E31Q/M150T, E31Q/E156Q/D157N, D23N/E31Q/R27Q, E31Q/Q56L/T95E, E31Q/K96Q/S119L, E31Q/E141K/I149V, E31Q/E141Q/I149V, S7P/E31Q/S50Y, E31Q/180T/181L/delD193, E31Q/P57A/S119L/delD193, E31Q/P57A/180T/181L/S119L/delD193, E31Q/P57A/K93D/T95E/S119L/delD193, E31Q/I80T/S119L/delD193, E31Q/I80T/I81L/K93D/T95E/delD193, E31Q/P57A/180T/181L/K93D/T95E/S119L/delD193, S7C/E31Q/S50C/delD193, S7C/E31Q/S50C/P57A/delD193, S7C/E31Q/S50C/S119L/delD193, S7C/E31Q/S50C/I80T/delD193, S7C/E31Q/S50C/I80T/S119L/delD193, S7C/E31Q/S50C/P57A/I80T/S119L/delD193, S10C/E31Q/N155C/delD193, S10C/E31Q/P57A/N155C/delD193, S10C/E31Q/S119L/N155C/delD193, S10C/E31Q/I80T/N155C/delD193, S10C/E31Q/I80T/S119L/N155C/delD193, S10C/E31Q/P57A/I80T/S119L/N155C/delD193, S10C/E31Q/I49C/delD193, L15C/E31Q/R147C/delD193, E31Q/T63C/P88C/delD193, S10C/D35E/N155C, S10C/S36D/N155C, S10C/S36N/N155C, S10C/K53V/N155C, S10C/K53Y/N155C, S10C/K53F/N155C, S10C/M51R/N155C, S10C/M51L/N155C, S10C/M51H/N155C, S10C/M51F/N155C, S10C/M51Y/N155C, S10C/S55D/N155C, S10C/S55E/N155C, S10C/S55T/N155C, S10C/P57Q/N155C, S10C/P57D/N155C, S10C/P57Y/N155C, S10C/P57N/N155C, S10C/M60Y/N155C, S10C/M60F/N155C, S10C/D110Q/N155C, S10C/D110R/N155C, S10C/N111D/N155C, S10C/N111S/N155C, S10C/N111T/N155C, S10C/N111E/N155C, S10C/D132Q/N155C, S10C/D132E/N155C, E6Q/S10C/K53D/N155C, E6Q/S10C/M51K/K53D/N155C, S10C/E31Q/D35N/N41Q/K53A/N155C, S10C/E31Q/N41Q/K53A/N155C, S10C/E31Q/K53A/N155C, S10C/K53T/N155C, S 10C/P57A/N155C, S 10C/M51K/K53D/N155C, S 10C/M51K/K53E/N155C, E6Q/S10C/K53E/N155C, E6Q/S10C/M51K/K53E/N155C, E6Q/S10C/M51K/P57E/N155C, S 1 OC/M51K/P57E/N155C, E6Q/S10C/P57E/N155C, S 1 OC/E31Q/K53T/N155C, S10C/K53G/P57E/N155C, S10C/K53T/P57E/N155C, S10C/K53A/P57E/N155C, S10C/P57E/N155C, S10C/K53D/N155C, S10C/E31Q/N41Q/N155C, S10C/K53A/N155C, S10C/K53G/N155C, S10C/K53E/N155C, S10C/K53S/N155C, S10C/M51L/K53D/N155C, S10C/K53D/D110R/N155C, S10C/K53D/N111T/N155C, S10C/K53D/S55T/N155C, S10C/K53D/S55T/D110R/N155C, S10C/M51L/K53D/S55T/D110R/N111T/N155C, S10C/M51L/K53D/S55T/D110R/N155C, S10C/K53D/S55T/D110R/N111T/N155C, S10C/K53D/S55T/N111T/N155C, S10C/E31Q/D35N/N155C, S10C/N41Q/N155C, S10C/D35N/N155C, S10C/D37N/N155C, S10C/E31Q/D37N/N155C, S10C/D35N/D37N/N155C, E6Q/S10C/M51L/K53D/S55T/D110R/N111T/N155C, S10C/K53D/H109Y/N155C, S10C/D37N/K53D/N155C, S10C/D35N/K53D/N155C, K8E/S10C/K53D/N155C, S10C/E31Q/K53D/N155C, S10C/N41Q/K53D/N155C, S10C/K53D/P57V/N155C, S10C/K53D/P57T/N155C, or E6Q/S10C/K53D/N111T/N155C.

[0269] In some embodiments, the IL18 variant of the IL18 x Fab-Fc fusion protein includes one or more amino acid substitutions provided in FIGS. 13A-13B, 14, 15A-15D, 16A-16E, 17A-B, 19A-19P, 20A-20D, 31, 36, 37, 39A-39B, 40, 41A-41C, 42A-42D, 43A-13B, 44A-44C, 45, 46, 47, 48, 51, 54, and 62. In some embodiments, the IL18 variant of the IL18-Fc fusion protein is depicted in any one of FIGS. 13A-13B, 14, 15A-15D, 16A-16E, 17A-17B, 18, 19A-19P, 20A-20D, 41A-41C, 42A-42D, 43A-13B, and 44A-44C. In certain embodiments, the IL18 variant includes an amino acid sequence set forth in SEQ ID NOS:84-238 and 799-949.

[0270] Any Fc domains can be included in the IL18 x Fab-Fc fusion protein, including the wildtype and variant Fc domains described herein. In some embodiments, each Fc domain includes a CH2 and CH3. In certain embodiments, the first and second Fc domains include a hinge, CH2 and CH3. In one embodiment, the first and second Fc domains each have the formula, from N-terminus to C-terminus, hinge-CH2-CH3. In exemplary embodiments, the first and second Fc domains of the monovalent IL18-Fc fusion protein are heterodimeric. Modifications for such Fc domains are described in Sections VI-VIII above.

[0271] In exemplary embodiments, the IL18 x Fab-Fc fusion protein is a heterodimeric Fc fusion protein. In some heterodimeric embodiments, the first and second Fc domains include the amino acid substitution set L368D/K370S: S364K/E357Q. In some embodiments, the S364K/E357Q modifications are in the first Fc domain and the L368D/K370S modifications are in the second Fc domain. In certain heterodimeric embodiments, the second Fc domain includes isosteric pI variants Q295E/N384D/Q418E/N421D. In certain embodiments, both the first and second Fc domains include FcKO variants: E233P/L234V/L235A/G236del/S267K, according to the EU numbering. In some embodiments, the first Fc domain and the second Fc domain each include K447del modifications. In some embodiments, the IL18 protein or variant thereof is linked to the Fc domain that includes isosteric pI variants (e.g., the second Fc domain).

[0272] In exemplary embodiments, the IL18 x Fab-Fc fusion protein is a heterodimeric Fc fusion protein containing a first monomer, a second monomer and a third monomer. In some embodiments, the first monomer includes a variable heavy chain, the second monomer includes an IL18 protein or variant thereof, and the third monomer includes a variable light chain. In some embodiments, the first monomer includes a first Fc domain with heterodimer skew variants S364K/E357Q and FcKO variants E233P/L234V/L235A/G236del/S267K, according to the EU index. In some embodiments, the second monomer includes a second Fc domain with heterodimer skew variants L368D/K370S, isosteric pI variants Q295E/N384D/Q418E/N421D, and FcKO variants E233P/L234V/L235A/G236del/S267K.

[0273] In some embodiments, the first and second monomers each also include M428L/N434S half-life extension variants. In some embodiments, the first and second monomers each also include a C220S hinge amino acid substitution.

[0274] In some embodiments, the first monomer includes a second Fc domain with modifications C220S/E233P/L234V/L235A/G236del/S267K/S364K/E357Q and optionally modifications M428L/N434S, the second monomer includes a first Fc domain with modifications C220 S/E233P/L234V/L235A/G236del/S267K/Q295E/L368D/K370 S/384D/Q418E/N421D and optionally M428L/N434S, and according to the EU numbering and a third monomer that does not include an Fc domain. and according to the EU numbering. In some embodiments, the first Fc domain of the first monomer and the second Fc domain of the second monomer each include K447del modifications.

[0275] FIGS. 21A-21M depict amino acid modifications in the first and second monomers of a heterodimeric monovalent IL18-Fc fusion protein. Additional, exemplary Fc domain “backbone sequences” that find use in the subject monovalent IL18-Fc fusion proteins are depicted in FIGS. 9A-9D and 10.

[0276] In the formulas above, “IL18” is any IL18 provided herein (see, e.g., wildtype or variant IL18 depicted in FIGS. 13A-13B, 14, 15A-15E, 16A-16E, 17A-17B, 18, 19A-19P, 20A-20D, 41A-41C, 42A-42D, 43A-13B, and 44A-44C), “Fc domain” refers to any Fc domain provided herein (e.g., wildtype or variant Fc domains provided herein), and “linker” refers to any linker provided herein (see, e.g., FIG. 8). Further, “N” and “C” refer to the N-terminal and C-terminal orientation of each component in the second monomer. In such embodiments, the first monomer only includes an Fc domain (i.e., an “empty Fc domain”). In some embodiments, the each of the first and second Fc domains have the formula N-hinge-CH2-CH3-C. In certain embodiments, each of the first and second Fc domains have the formula N-CH2-CH3-C.

[0277] Exemplary IL18 x Fab-Fc fusion proteins include XENP37827, XENP37828, XENP38850, XENP38851, XENP38852, XENP38853, XENP38854, XENP38855, XENP38856, XENP38857, XENP38858, XENP38859, XENP38860, XENP38861, XENP38862, XENP38863, XENP38864, XENP38865, XENP38866, XENP38867, XENP38868, XENP38952, XENP38953, XENP38954, XENP38868, XENP38956, XENP38957, XENP39601, XENP39602, XENP39603, XENP39604, XENP40027, XENP40046, XENP40047, XENP40048, XENP40049, XENP40050, XENP40051, XENP40052, XENP40053, XENP40054, XENP40175, XENP40176, XENP40177, XENP40178, XENP40179, XENP40181, XENP40182, XENP40183, XENP40184, XENP40185, XENP40186, XENP40187, XENP40188, XENP40189, XENP40190, XENP40191, XENP40192, XENP40193, XENP40194, XENP40195, XENP40196, XENP40197, XENP40198, XENP40199, XENP40200, XENP40201, XENP40202, XENP40203, XENP40204, XENP40205, XENP40206, XENP40207, XENP40208, XENP40209, XENP40210, XENP40211, XENP40212, XENP40213, XENP40214, XENP40215, XENP40216, XENP40217, XENP40218, XENP40219, XENP40220, XENP40221, XENP40222, XENP40223, XENP40224, XENP40225, XENP40226, XENP40227, XENP40228, XENP40229, XENP40230, XENP40231, XENP40232, XENP40233, XENP40234, XENP40235, XENP40236, XENP40237, XENP40238, XENP40239, XENP40240, XENP40241, XENP40242, XENP40243, XENP40244, XENP40246, XENP40247, XENP40248, XENP40249, XENP40250, XENP40251, XENP40252, XENP40253, XENP40254, XENP40255, XENP40256, XENP40257, XENP40258, XENP40259, XENP40260, XENP40261, XENP40262, XENP40263, XENP40264, XENP40265, XENP40266, XENP40267, XENP40268, XENP40269, XENP40363, XENP40364, XENP40617, XENP40618, XENP40619, XENP40620, XENP40621, XENP40622, XENP40623, XENP40624, XENP40625, XENP40626, XENP40627, XENP40628, XENP40629, XENP40630, XENP40631, XENP40632, XENP40657, XENP40658, XENP40659, XENP40660, XENP40661, XENP40662, XENP40663, XENP40686, XENP40934, XENP40935, XENP40936, XENP40937, XENP40938, XENP40939, XENP40940, XENP40941, XENP40942, XENP40943, XENP40944, XENP40945, XENP40946, XENP40947, XENP40948, XENP40949, XENP40950, XENP40951, XENP40952, XENP40953, XENP40954, XENP40955, XENP40956, XENP40957, XENP40958, XENP40959, XENP40960, XENP40961, XENP41076, XENP41077, XENP41078, XENP41079, XENP41080, XENP41081, XENP41082, XENP41083, XENP41084, XENP41085, XENP41086, XENP41087, XENP41088, XENP41089, XENP41090, XENP41091, XENP41092, XENP41093, XENP41094, XENP41095, XENP41096, XENP41353, XENP41416, XENP41417, XENP41418, XENP41419, XENP41420, XENP41421, XENP41422, XENP41423, XENP41424, XENP41425, XENP41426, XENP41427, XENP41427, XENP41429, XENP41430, XENP41431, XENP41440, XENP41513, XENP41514, XENP41515, XENP41516, XENP41517, XENP41518, XENP41519, and XENP41520 as shown in FIGS. 22A-22CZ and the corresponding sequences (see, e.g., SEQ ID NOS:294-774 and 1040-1264).

[0278] XI. Nucleic Acids

[0279] In another aspect, provided herein are nucleic acid compositions encoding the subject IL18-Fc fusion proteins and IL18s (e.g., variant IL18s) described herein. As will be appreciated by those in the art, the nucleic acid compositions will depend on the format of the fusion protein. Thus, for example, when the format requires two amino acid sequences (e.g., heterodimeric

[0280] IL18-Fc fusions), two nucleic acid sequences can be incorporated into one or more expression vectors for expression.

[0281] As is known in the art, the nucleic acids encoding the monomer components of the IL18-Fc fusion proteins can be incorporated into expression vectors as is known in the art, and depending on the host cells used to produce the heterodimeric IL18-Fc fusion proteins. Generally, the nucleic acids are operably linked to any number of regulatory elements (promoters, origin of replication, selectable markers, ribosomal binding sites, inducers, etc.). The expression vectors can be extra-chromosomal or integrating vectors.

[0282] The nucleic acids and/or expression vectors are then transformed into any number of different types of host cells as is well known in the art, including, but not limited to, mammalian, bacterial, yeast, insect and/or fungal cells, with mammalian cells (e.g. CHO cells) being preferred.

[0283] In some embodiments, particularly heterodimeric IL18-Fc fusion proteins, nucleic acids encoding each monomer are each contained within a single expression vector, generally under different or the same promoter controls. In certain embodiments, each of the two nucleic acids are contained on a different expression vector.

[0284] The subject IL18-Fc fusion protein are made by culturing host cells comprising the expression vector(s) as is well known in the art. Once produced, traditional fusion protein or antibody purification steps are done, including an ion exchange chromatography step. As discussed herein, having the pIs of the two monomers differ by at least 0.5 can allow separation by ion exchange chromatography or isoelectric focusing, or other methods sensitive to isoelectric point. That is, the inclusion of pI variants that alter the isoelectric point (pI) of each monomer so that each monomer has a different pI and the resulting heterodimeric IL18-Fc fusion protein also has a distinct pI advantageously facilitates isoelectric purification of the heterodimer (e.g., anionic exchange chromatography, cationic exchange chromatography). These substitutions also aid in the determination and monitoring of any contaminating homodimers post-purification (e.g., IEF gels, cIEF, and analytical IEX columns).

[0285] XII. Biological and Biochemical Functionality of IL18 Fc Fusion Proteins

[0286] Biological activity of the subject IL18-Fc fusion proteins (including IL18 x Fab-Fc fusion) and variant IL18s can be assessed using any IL18 activity assay known in the art. In exemplary in vitro assays, the test IL18-Fc fusion proteins can be used to stimulate the human myelomonocytic cell line, KG-1, which produces IFNy and then upregulates PD-L1 which can be measured. IL18BP inhibition of the IL18-Fc fusion proteins can also be determined in such assays

[0287] The effects of subject IL18-Fc fusion protein and variant IL18s on the proliferation of various lymphocyte populations can be assessed using any method for lymphocyte proliferation, for example, but not limited to CFSE dilution method, Ki67 intracellular staining of immune effector cells, and ³H-thymidine incorporation method.

[0288] Biological activity of the subject IL18-Fc fusion proteins can also be tested in vivo in an animal model, such as a Graft-versus-Host Disease (GVHD) model conducted in immunodeficient mice with engraftment of foreign immune cells (e.g., human PBMCs).

[0289] Generally, the subject IL18-Fc fusion proteins are administered to patients in need thereof (e.g., a patient with a cancer) and efficacy is assessed, in a number of ways as described herein. Thus, while standard assays of efficacy can be run, such as cancer load, size of tumor, evaluation of presence or extent of metastasis, etc., immuno-oncology treatments can be assessed on the basis of immune status evaluations as well. This can be done in a number of ways, including both in vitro and in vivo assays.

[0290] For example, evaluation of changes in immune status (e.g., presence of ICOS+CD4+T cells following ipi treatment) along with traditional measurements such as tumor burden, size, invasiveness, LN involvement, metastasis, etc. can be done. Thus, any or all of the following can be evaluated: the inhibitory effects of PVRIG on CD4⁺ T cell activation or proliferation, CDS⁺ T (CTL) cell activation or proliferation, CDS⁺ T cell-mediated cytotoxic activity and/or CTL mediated cell depletion, NK cell activity and NK mediated cell depletion, the potentiating effects of PVRIG on Treg cell differentiation and proliferation and Treg- or myeloid derived suppressor cell (MDSC)-mediated immunosuppression or immune tolerance, and/or the effects of PVRIG on proinflammatory cytokine production by immune cells, e.g., IL-2, IFN-γ or TNF-α production by T or other immune cells.

[0291] In some embodiments, assessment of treatment is done by evaluating immune cell proliferation, using for example, CF SE dilution method, Ki67 intracellular staining of immune effector cells, and ³H-thymidine incorporation method.

[0292] In some embodiments, assessment of treatment is done by evaluating the increase in gene expression or increased protein levels of activation-associated markers, including one or more of: CD25, CD69, CD137, ICOS, PD1, GITR, OX40, and cell degranulation measured by surface expression of CD107A.

[0293] In general, gene expression assays are done as is known in the art.

[0294] In general, protein expression measurements are also similarly done as is known in the art.

[0295] In some embodiments, assessment of treatment is done by assessing cytotoxic activity measured by target cell viability detection via estimating numerous cell parameters such as enzyme activity (including protease activity), cell membrane permeability, cell adherence, ATP production, co-enzyme production, and nucleotide uptake activity. Specific examples of these assays include, but are not limited to, Trypan Blue or PI staining, ⁵¹Cr or ³⁵S release method, LDH activity, MTT and/or WST assays, Calcein-AM assay, Luminescent based assay, Annexin V staining, Zombie AquaTM staining and others.

[0296] In some embodiments, assessment of treatment is done by assessing T cell activity measured by cytokine production, measured either intracellularly or in culture supernatant using cytokines including, but not limited to, IFNy, TNFa, GM-CSF, IL2, IL6, IL4, ILS, IL10, IL13 using well known techniques.

[0297] Accordingly, assessment of treatment can be done using assays that evaluate one or more of the following: (i) increases in immune response, (ii) increases in activation of af3 and/or y6 T cells, (iii) increases in cytotoxic T cell activity, (iv) increases in NK and/or NKT cell activity, (v) alleviation of af3 and/or y6 T-cell suppression, (vi) increases in pro-inflammatory cytokine secretion, (vii) increases in IL-2 secretion; (viii) increases in interferon-y production, (ix) increases in Th1 response, (x) decreases in Th2 response, (xi) decreases or eliminates cell number and/or activity of at least one of regulatory T cells (Tregs).

[0298] XIII. Treatments

[0299] Once made, the subject IL18-Fc fusion proteins find use in a number of oncology applications, such as by promoting IL18-Fc related immune cell activation (e.g., T cells are no longer suppressed) and proliferation.

[0300] Accordingly, the subject IL18-Fc fusion proteins provided find use in the treatment of these cancers.

[0301] A. Fusion Protein Compositions for In Vivo Administration

[0302] Formulations of the IL18-Fc fusion proteins used in accordance with the present invention are prepared for storage by mixing a fusion protein having the desired degree of purity with optional pharmaceutically acceptable carriers, excipients or stabilizers (as generally outlined in Remington's Pharmaceutical Sciences 16th edition, Osol, A. Ed. [1980]), in the form of lyophilized formulations or aqueous solutions. Acceptable carriers, buffers, excipients, or stabilizers are nontoxic to recipients at the dosages and concentrations employed, and include buffers such as phosphate, citrate, and other organic acids; antioxidants including ascorbic acid and methionine; preservatives (such as octadecyldimethylbenzyl ammonium chloride; hexamethonium chloride; benzalkonium chloride, benzethonium chloride; phenol, butyl or benzyl alcohol; alkyl parabens such as methyl or propyl paraben; catechol; resorcinol; cyclohexanol; 3-pentanol; and m-cresol); low molecular weight (less than about 10 residues) polypeptides; proteins, such as serum albumin, gelatin, or immunoglobulins; hydrophilic polymers such as polyvinylpyrrolidone; amino acids such as glycine, glutamine, asparagine, histidine, arginine, or lysine; monosaccharides, disaccharides, and other carbohydrates including glucose, mannose, or dextrins; chelating agents such as EDTA; sugars such as sucrose, mannitol, trehalose or sorbitol; salt-forming counter-ions such as sodium; metal complexes (e.g. Zn-protein complexes); and/or non-ionic surfactants such as TWEENTM, PLURONICSTM or polyethylene glycol (PEG).

[0303] B. Administrative Modalities

[0304] The IL18-Fc fusion proteins and chemotherapeutic agents are administered to a subject, in accord with known methods, such as intravenous administration as a bolus or by continuous infusion over a period of time.

[0305] C. Treatment Modalities

[0306] In the methods of treatment provided herein, therapy is used to provide a positive therapeutic response with respect to a disease or condition (e.g., a cancer). By “positive therapeutic response” is intended an improvement in the disease or condition, and/or an improvement in the symptoms associated with the disease or condition. For example, a positive therapeutic response would refer to one or more of the following improvements in the disease: (1) a reduction in the number of neoplastic cells; (2) an increase in neoplastic cell death; (3) inhibition of neoplastic cell survival; (5) inhibition (i.e., slowing to some extent, preferably halting) of tumor growth; (6) an increased patient survival rate; and (7) some relief from one or more symptoms associated with the disease or condition.

[0307] Positive therapeutic responses in any given disease or condition can be determined by standardized response criteria specific to that disease or condition. Tumor response can be assessed for changes in tumor morphology (i.e., overall tumor burden, tumor size, and the like) using screening techniques such as magnetic resonance imaging (MRI) scan, x-radiographic imaging, computed tomographic (CT) scan, bone scan imaging, endoscopy, and tumor biopsy sampling including bone marrow aspiration (BMA) and counting of tumor cells in the circulation.

[0308] In addition to these positive therapeutic responses, the subject undergoing therapy may experience the beneficial effect of an improvement in the symptoms associated with the disease.

[0309] Treatment according to the present invention includes a “therapeutically effective amount” of the medicaments used. A “therapeutically effective amount” refers to an amount effective, at dosages and for periods of time necessary, to achieve a desired therapeutic result.

[0310] A therapeutically effective amount may vary according to factors such as the disease state, age, sex, and weight of the individual, and the ability of the medicaments to elicit a desired response in the individual. A therapeutically effective amount is also one in which any toxic or detrimental effects of the protein or protein portion are outweighed by the therapeutically beneficial effects.

[0311] A “therapeutically effective amount” for tumor therapy may also be measured by its ability to stabilize the progression of disease. The ability of a compound to inhibit cancer may be evaluated in an animal model system predictive of efficacy in human tumors.

[0312] Alternatively, this property of a composition may be evaluated by examining the ability of the compound to inhibit cell growth or to induce apoptosis by in vitro assays known to the skilled practitioner. A therapeutically effective amount of a therapeutic compound may decrease tumor size, or otherwise ameliorate symptoms in a subject. One of ordinary skill in the art would be able to determine such amounts based on such factors as the subject's size, the severity of the subject's symptoms, and the particular composition or route of administration selected.

[0313] Dosage regimens are adjusted to provide the optimum desired response (e.g., a therapeutic response). For example, a single bolus may be administered, several divided doses may be administered over time or the dose may be proportionally reduced or increased as indicated by the exigencies of the therapeutic situation. Parenteral compositions may be formulated in dosage unit form for ease of administration and uniformity of dosage. Dosage unit form as used herein refers to physically discrete units suited as unitary dosages for the subjects to be treated; each unit contains a predetermined quantity of active compound calculated to produce the desired therapeutic effect in association with the required pharmaceutical carrier.

[0314] The specification for the dosage unit forms of the present invention are dictated by and directly dependent on (a) the unique characteristics of the active compound and the particular therapeutic effect to be achieved, and (b) the limitations inherent in the art of compounding such an active compound for the treatment of sensitivity in individuals.

[0315] The efficient dosages and the dosage regimens for the heterodimeric proteins used in the present invention depend on the disease or condition to be treated and may be determined by the persons skilled in the art.

[0316] An exemplary, non-limiting range for a therapeutically effective amount of an heterodimeric proteins used in the present invention is about 0.1-100 mg/kg.

[0317] All cited references are herein expressly incorporated by reference in their entirety.

[0318] Whereas particular embodiments of the invention have been described above for purposes of illustration, it will be appreciated by those skilled in the art that numerous variations of the details may be made without departing from the invention as described in the appended claims.

### EXAMPLES

[0319] Examples are provided below to illustrate the present invention. These examples are not meant to constrain the present invention to any particular application or theory of operation. For all constant region positions discussed in the present invention, numbering is according to the EU index as in Kabat (Kabat et al., 1991, Sequences of Proteins of Immunological Interest, 5th Ed., United States Public Health Service, National Institutes of Health, Bethesda, entirely incorporated by reference). Those skilled in the art of antibodies will appreciate that this convention consists of nonsequential numbering in specific regions of an immunoglobulin sequence, enabling a normalized reference to conserved positions in immunoglobulin families. Accordingly, the positions of any given immunoglobulin as defined by the EU index will not necessarily correspond to its sequential sequence.

[0320] General and specific scientific techniques are outlined in US Publ. App. No. 2015/0307629, US Publ. App. No. 2014/0288275, US Patent No. US 9,605,084 and WO 2014/145806, all of which are expressly incorporated by reference in their entirety and particularly for the techniques outlined therein.

### Example 1

### Engineering and Production of IL18 Fusion Proteins

[0321] As depicted in FIG. 71, IL18R1 expression is biased towards NKs and memory T cell and can be targeted by IL18. As described above, cytokines such as IL18 have short half-life, and high dose treatment is required to achieve a concentration of cytokines at the target (e.g., tumor site) sufficient to induce an immune response. However, based on observations with other cytokines, high dose treatment with IL18 could potentially result in systemic toxicities. In order to address this issue, IL18 molecules were engineered as Fc fusions in various formats (collectively referred to hereon as IL18 fusion proteins or just IL18 fusions) with the aim to enhance serum half-life through FcRn-mediated recycling.

[0322] 1A: IL18 Fusion Protein Formats

[0323] 1A(a): IL18-Fc Fusions

[0324] Various IL18-Fc fusion formats were conceived. One such exemplary format of this category is the “monovIL18-Fc” format (cartoon schematic depicted in FIG. 12A) which comprises a first monomer comprising an IL18 monomer covalently attached to the N-terminus of a first heterodimeric Fc chain (optionally via a domain linker) and a second monomer comprising a complementary second heterodimeric Fc chain that is “Fc-only” or “empty-Fc”. Illustrative proteins of the monovIL18-Fc format are depicted in FIGS. 21A-21M.

[0325] 1A(b): IL18 x Fab-Fc Fusions

[0326] For the reasons described in Example 2C, another category of IL18 fusions include a Fab arm. One such exemplary format of this category is the “IL18 x Fab-Fc” format (cartoon schematic depicted in FIG. 12B) which comprises a first monomer comprising an IL18 monomer covalently attached to the N-terminus of a first heterodimeric Fc chain (optionally via a domain linker), a second monomer comprising a variable heavy (VH) region covalently attached to the N-terminus of a complementary second heterodimeric Fc chain, and a third monomer that is a corresponding light chain that forms a Fab with the second monomer. Illustrative proteins of the IL18 x Fab-Fc format are depicted in FIGS. 22A-22CZ.

[0327] 1B: Production and purification of IL18 Fusion Proteins

[0328] To produce IL18 fusions in the monovIL18-Fc or the IL18 x Fab-Fc formats, plasmida coding for IL18 (WT or variant) was constructed by standard gene synthesis, followed by subcloning into pTT5 expression vectors containing Fc fusion partners (e.g. domain linkers and heterodimeric Fc backbones as depicted in FIGS. 8 and 9A-9C). For IL18 fusions in the monovIL18-Fc format, an additional plasmid encoding a complementary heterodimeric empty-Fc was used. Additionally, in the case of IL18 fusions in the IL18 x Fab-Fc formats, plasmid coding for the variable heavy and variable light regions were constructed by standard gene synthesis, followed by subcloning into pTT5 expression vectors containing either Fc fusion partners (e.g. CH1 regions, domain linkers, and heterodimeric Fc backbones as depicted in FIGS. 8, 9A-9C, and 10) or constant light domain (e.g. Constant Light Domain—Kappa as depicted in FIG. 11). Proteins were produced by transient transfection of HEK293E or CHO cells with appropriate set of plasmids as described above.

[0329] As will be described in Example 2D, IL18 fusions may be engineered with Rapid Purification (RP) variants for ease of purification. IL18 fusions without the RP variants were purified via a two-step purification process comprising protein A chromatography (purification part 1) followed by ion exchange chromatography (purification part 2). IL18 fusions with the RP variants were purified via one-step purification comprising just protein A chromatography.

[0330] Post-purification material (from separation peaks) may be further characterized by analytical size-exclusion chromatography with multi-angle light scattering (aSEC-MALS) and analytical anion-exchange chromatography (aAEX) for identity, purity and homogeneity as generally described below.

[0331] For aSEC-MALS, the analysis was performed on an Agilent 1200 high-performance liquid chromatography (HPLC) system. Samples were injected onto a SuperdexTM 200 10/300 GL column (GE Healthcare Life Sciences) at 1.0 mL/min using 1× PBS, pH 7.4 as the mobile phase at 4oC for 25 minutes with UV detection wavelength at 280 nM. MALS was performed on a miniDAWN® TREOS® with an Optilab® T-rEX Refractive Index Detector (Wyatt Technology, Santa Barbara, CA). Analysis was performed using Agilent OpenLab Chromatography Data System (CDS) ChemStation Edition AIC version C.01.07 and ASTRA version 6.1.7.15.

[0332] For aAEX, The analysis was performed on an Agilent 1200 high-performance liquid chromatography (HPLC) system. Samples were injected onto a Proteomix SAX-NP5 5₁1.M non-porous column (Sepax Technologies, Inc., Newark, Del.) at 1.0 mL/min using 0-40% NaCl gradient in 20 mM IVIES, pH 8.5 buffer with UV detection wavelength at 280 nM. Analysis was performed using Agilent OpenLAB CDS ChemStation Edition AIC version C.01.07.

### Example 2

### Engineering IL18 Variants (and Additional Approaches) to Improve Production

[0333] In this section, engineering approaches to improve IL18 fusion production are described. Collectively, these include engineering approaches to improve yield as well as to decrease molecular heterogeneity and the variants are collectively referred to herein as production variants.

[0334] 2A: Engineering IL18 to Remove Free Cysteines

[0335] Initially, IL18 fusion XENP30792 in the monovIL18-Fc format was produced using WT human IL18 (sequence as depicted in FIG. 1 for WT human IL18 mature form sequence; and in FIG. 21A for XENP30792). XENP30792 was produced and purified via the two-step purification process as generally described in Example 1B. FIG. 23A depicts the chromatogram showing purification part 2 of XENP30792 as a broad heterogeneous peak. The full pre-purified load and material from the broad peak were further characterized by aSEC-MALS which show that the material was predominantly heavy molecular weight species (FIG. 23B).

[0336] Based on the crystal structure of human IL18 as reported by Tsutsumi et al. (Nature Communications, 15 Dec. 2014, 5, 5340) [PDB code 3WO2] and modeling in Molecular Operating Environment (MOE; Chemical Computing Group, Montreal, Quebec, Canada), it was found that the four cysteine residues were spatially distant and unlikely to form intramolecular disulfide bridges. Accordingly, it was hypothesized that the heavy molecular weight species were aggregate material resulting from intermolecular mispairing of free cysteines (as would be consistent with Yamamoto 2004). This was likely not a problem for human IL18 recombinantly produced in E. coli as expression takes place at lower temperature and in a reduced environment. Therefore, an IL18 variant 4CS was engineered with C38S, C68S, C76S and C127S (sequence as depicted in FIG. 13). IL18 fusion XENP31296 with IL18-4CS in the monovIL18-Fc format (sequences as depicted in FIGS. 21A-21M) was produced and purified as generally described in Example 1B. FIG. 24A depicts the chromatogram showing purification part 2 of XENP31296 as 3 distinct peaks (P1, B, and A). The 3 peaks were further characterized by aSEC-MALS, and chromatograms are depicted in FIG. 24B along with MW of component species. The profiles show that peak B comprises a single species of —72.3 kD which is consistent with the calculated molecular weight of XENP31296 (based on amino acid sequence) of 70.4 kD. Hereon, IL18 variant including only the 4CS substitution is referred to as WT-4CS.

[0337] 2B: Additional Engineering to Remove Liabilities

[0338] In view of the potential impact of post-translational modification related liabilities as observed in Example 2A, additional engineering approaches were utilized to remove other potential liabilities.

[0339] One such approach was removal of the C-terminal lysine on the Fc regions. Therefore, each of the backbones as depicted in FIGS. 9A-9C (and in fact each of the IL18 fusion sequences depicted herein) may include a K447 deletion (K447_ or K447del) in one or both Fc regions.

[0340] Another such approach was removal of a “DG” aspartic acid isomerization motif. Initial IL18 fusion constructs were produced with IL18 covalently attached to a G4S linker. The C-terminal D of IL18 and the glycine residue introduces such a DG motif. A first approach explored was removal of the G4S linker so that the IL18 is covalently attached to the N-terminal of E of the hinge region. This approach significantly reduced molecular heterogeneity; however, it drastically reduced yield. Additional approaches explored to remove the DG motif included deletion or substitution of the C-terminal D of IL18 (e.g., XENP31812, XENP31813, XENP31814, XENP38952 and XENP38953) or utilizing alternative linkers that do not introduce the DG motif (e.g., AG4 or EA3K as in XENP38954, XENP38955, XENP38956, and XENP38957).

[0341] 2C: Engineering IL18-Fc with a Silent Fab Arm

[0342] Another approach conceived for improving the production of IL18 fusions was to produce the molecules with a Fab arm occupying the empty-Fc side. To avoid non-specific activity of the IL18 fusions, the Fab arm used was a silent Fv based on SEQ ID NOs:23 and 24 as disclosed in the sequence listing of WO 2020/078905.

[0343] FIG. 25A depicts the chromatogram showing purification part 2 of XENP37827 as 2 distinct peaks (B and C) which is an improvement over the purification profile of XENP31296 as 3 distinct peaks. Peak B was from purification part 2 was further characterized by aSEC-MALS, and chromatograms are depicted in FIG. 25B along with MW of component species. The profiles show that peak B comprises a single species of —119.7 kD which is consistent with the calculated molecular weight of XENP37827 (based on amino acid sequence) of 116.2 kD.

[0344] Surprisingly, this format also enabled enhanced yield (data not shown). Although the E31Q variant was later identified as a variant which enhanced yield, this format was advantageous for further screening of variants so that substitutions which may be detrimental to yield but otherwise advantageous for other properties (e.g. improving therapeutic index) could be recovered.

[0345] Additionally, alternative silent Fvs (e.g. germline sequences) may also be employed. An illustrative IL18 fusions in the IL18 x Fab-Fc format utilizing the DP47GS germline sequence is depicted in FIG. 22CA as XENP40686.

[0346] 2D: Engineering IL18 Fusions for Rapid Purification (RP)

[0347] To simplify purification to enable higher throughput screening of IL18 variants, IL18 fusions were engineered with Rapid Purification or RP variants. Specifically, the empty-Fc or Fab-Fc chain was engineered with the H435R/Y436F variants to ablate Protein A binding. Combined with DNA ratio optimization which reduced formation of IL18-Fc homodimers, this approach enabled a single-step Protein A purification which removed empty-Fc homodimers (in the case of monovIL18-Fc) or Fab-Fc homodimers (in the case of IL18 x Fab-Fc). Although many of the IL18 fusion sequences described herein include the RP variants, the IL18 fusions may be engineered and produced without the RP variants.

[0348] 2E: E31Q Variant Enhances Yield

[0349] In engineering IL18 affinity variants as described in Example 3, the E31Q substitution was unexpectedly found to improve production yield. In combination with DNA ratio optimization, the E31Q substitution removed the necessity for engineering IL18 fusions in the IL18 x Fab-Fc format.

### Example 3

### Engineering IL18 Variants to Improve Therapeutic Index

[0350] In vivo, IL18's proinflammatory effect is attenuated by IFNy-dependent expression of IL18BP (sequence depicted in FIGS. 1-3, respectively for human, mouse, and F). IL18BP binds free IL18 and prevents IL18 binding to IL18R1. In order to overcome the IL18BP sink, it would be necessary to dose IL18 fusions at high concentrations; however, this may lead to systemic toxicity.

[0351] It was reasoned that decreasing the affinity of IL18 for IL18 receptors (and by extension, decreasing their potency) would allow for higher dosing to overcome the IL18BP sink and extend the half-life of the IL18 fusion proteins. Alternatively, or in addition to this approach, it was reasoned that decreasing the affinity of IL18 for IL18BP would overcome this sink. Accordingly, IL18 variants were engineered with the aim to achieve one or both of these targets, and these variants are collectively referred to herein as affinity variants. It should be noted that variants with improved binding to IL18BP and/or the IL18 receptors were also identified and useful in certain contexts, and these variants are also considered as affinity variants.

[0352] 3A: Kinetic Binding Assay

[0353] Binding of variant IL18 to IL18 receptors or IL18BP were investigated using Octet, a BioLayer Interferometry (BLI)-based method. Experimental steps for Octet generally include the following: Immobilization (capture of ligand to a biosensor); Association (dipping of ligand-coated biosensors into wells containing serial dilutions of the analyte); and Dissociation (returning of biosensors to well containing buffer) in order to determine the affinity of the test articles. A reference well containing buffer alone was also included in the method for background correction during data processing. In particular, ligands used were IL18R1, IL18R1xIL18RAP heterodimer, or IL18BP, and the analytes were IL18 fusions. Illustrative sequences for these antigens are depicted in FIGS. 1-3 (respectively for human, mouse, and cynomolgus monkey).

[0354] 3B: In Vitro Assay

[0355] To screen for IL18 variants engineered for reduced activation via IL18 receptors or reduced neutralization by IL18BP, in vitro assays were also used. For these assays, human myelomonocytic cell line, KG-1, which produces IFNy and upregulates PD-L1 in response to human IL18 was utilized.

[0356] In one assay format, dose dependent activation by IL18 fusions was investigated by stimulating KG-1 cells with increasing concentrations of IL18 fusions alone (to investigate reduced activation potency) or in the presence of fixed amount of IL18BP (to investigate reduced neutralization by IL18BP). IL18BP levels in NSCLC patient serum has been reported to be in the range of 10-50 ng/ ml (or 0.5-3 nM). Accordingly in this assay format, 100 ng/ml (5.6 nM) IL18BP was added to simulate higher end of in vivo IL18BP levels.

[0357] In another assay format, the dose dependent neutralization effect of IL18BP was investigated by stimulated KG-1 cells with fixed amount of IL18 fusions in the presence of increasing concentrations of IL18BP.

[0358] Illustrative examples of these two assay formats utilizing recombinantly produced IL18 (MBL, Cat: #B001-5) and IL18BP (Acro, Cat. ILP-H5222) are depicted in FIGS. 26A-26B.

[0359] 3C: Affinity Variants (Library 1)

[0360] Several approaches were used in a first round of engineering. Crystal structure of the IL18 signaling ternary complex as reported by Tsutsumi et al., supra [PDB code 3W04] and crystal structure of human IL18 in complex with Ectromelia virus IL18 binding protein as reported by Krumm et al. (Proc Natl Acad Sci USA, 30 Dec 2008, 105(52):20711-20715) [PDB code 3F62] were used to identify residues on IL18 which interacted with any part of the IL18 receptors or IL18BP. In particular, MOE software's free energy calculations (AMBER force field parameters) was used to calculate energy between amino acid residues at the IL18:IL18R1 interface or the IL18:IL18BP interface. This round primarily focused on residues such as D, E, N, and Q at which isosteric substitutions could be introduced (reasoning that isosteric substitutions have less potential for immunogenicity) and identified E6, D17, E31, D35, D37, D40, N41, Q103, D110, and N111 as suitable residues for engineering. However, Y1 and K53 were also identified by the free energy calculations. In particular, K53 was calculated to be a residue very important for IL18:IL18BP binding. Based on this analysis, a number of IL18 variants were engineered (sequences for which are depicted in FIGS. 15A-15D) and formatted as IL18 x Fab-Fc fusions (sequences for which are depicted in FIGS. 22A-22CZ as noted above in Example 2A, these variants were engineered on the 4CS background).

[0361] The variant IL18 x Fab-Fc fusions were investigated in vitro as generally described above in Example 3B. In a first experiment, KG-1 cells were stimulated with increasing concentrations of IL18 fusions for 48 hours after which IL18 activity was evaluated by staining for PD-L1 expression as an indication of KG-1 cell activation. In a second set of experiments, KG-1 cells were stimulated with increasing concentrations of IL18 fusions for 48 hours in the absence or presence of fixed concentration of IL18BP. The data as depicted in FIG. 27 show that a number of the variants including E31Q, D35N, D37N, N41Q, K53M, and K53A decreased potency in KG-1 activation relative to WT-4CS IL18. The data as depicted in FIGS. 28A-28S show that for most of the variants, incubation with IL18BP shifts the activation potency; however, XENP38865 having the K53A appear minimally impacted by IL18BP (FIG. 28P) indicating that the K53A substitution reduces binding affinity and sink by IL18BP. It should be noted that, while not shown, molar equivalent (relative to XENP37827) of recombinant human IL-18 induces PD-L1 expression with similar potency as XENP37827.

[0362] In another set of experiments, KG-1 cells were stimulated with fixed concentration of IL18 fusions (10 nM) or molar equivalent of recombinant IL18 (5.6 nM) for 48 hours in the presence of increasing concentrations of IL18BP. IL18 activity was evaluated by staining for PD-L1 expression as an indication of KG-1 cell activation, data for which are depicted in FIGS. 29-30. Notably as depicted in FIG. 29 and consistent with the above, the specific substitution at K53A IL18's ability to escape IL18BP neutralization. For example, K53R substitution has no impact relative to WT. At this fixed concentration of IL18 fusion proteins, the K53M, K53Q and K53E variants exhibit slightly reduced inhibition potency relative to WT-4CS (as depicted in FIG. 29), but also exhibits reduced activation efficacy. The K53A variant exhibits reduced inhibition potency only.

[0363] Interestingly as seen in FIGS. 28C and 28D, the E6A and E6Q variants were found to improve binding to IL18R1. While this is opposite to the engineering target, these substitutions could be useful for introducing into very weak IL18R1-binding variants which may have otherwise advantageous properties (e.g., reduced IL18BP binding) to restore IL18R1 binding. Additionally as this residue is clearly important for binding between IL18 and IL18R1, other substitutions at this position may conversely reduce binding to IL18R1.

[0364] 3D: Affinity Variants (Library 2)

[0365] Following the success from the first library of affinity variants, a further library was made to identify additional residues for introducing substitutions as well as to investigate combinations of substitutions. This library focused on positions along the IL18:IL18BP interface to identify variants with decreased binding to IL18BP. As this interface overlaps with the IL18:IL18R1 interface, mutations may have an effect on interactions with both IL18BP and IL18R1. Accordingly, this library further focused on variants that drastically reduced IL18BP binding while minimally impacted IL18R1 binding; improved binding to IL18R1 while minimally impacting binding to IL18BP; or decreased binding to both IL18R1 and IL18RAP. Additional residues identified include K8, M51, S55, Q56, P57, M60, and H109. Additional IL18 variants were engineered (sequences for which are depicted in FIGS. 16A-16E and 17A-17B) and formatted as IL18 x Fab-Fc fusions (sequences for which are depicted in FIGS. 22A-22CZ; as above, these variants were engineered on the 4CS background).

[0366] Kinetic binding experiments as generally described in Example 3A were performed to investigate the binding of the variant IL18 x Fab-Fc fusions to IL18R1 antigen, ILBP antigen, and IL18R1xIL18RAP heterodimer antigen, data for which are summarized in FIG. 31. Notably, a K53D single substitution variant (XENP40253) was found to have a weaker binding response to IL18R1 and IL18R1xRAP but advantageously also no binding response to IL18BP. The K53N single substitution variant (XENP40252) also abrogated binding to IL18BP, but also resulted in much weaker IL18R1xRAP binding. Additional observations made were as follows: several other substitutions at K53 also enabled weakened binding for both IL18R1 and IL18BP, albeit not to the same level of weaked IL18BP binding as K53D and K53N; S55N and S55Q enabled weakened binding to IL18R1 and IL18BP, although at the expense of stability (as depicted in FIGS. 36); and M41K enabled enhanced binding for IL18R1.

[0367] Next, in vitro assays as generally described in Example 3B were performed to investigate activation potency of the variant IL18 x Fab-Fc fusions. KG-1 cells stimulated with indicated concentrations of the IL18 x Fab-Fc fusions for 48 hours after which cells were stained with anti-PDL1 mAb to evaluate IL18 activity. Data are depicted in FIGS. 32-35.

[0368] Notably, K53T may be a promising variant as it demonstrated good induction activity with very quick off-rate (as determined by Octet binding). Additionally, K53E demonstrated good induction of activity at higher concentration. P57E demonstrated similar induction of activity in comparison to K53E, but as will be described in Example 4C, the P57E additionally improves stability.The K53D and K53N variants demonstrated activity which is promising, and in addition, the K53N variant improves stability (as depicted in Example 4C) possibly by introducing an N-linked glycoylation.

### Example 4

### Engineering IL18 Variants to Improve Stability

[0369] 4A: Stability Assay

[0370] Stability of the IL18 fusions were assessed using Differential Scanning Fluorimetry (DSF). DSF experiments were performed using a Bio-Rad CFX Connect Real-Time PCR Detection System. Proteins were mixed with SYPRO Orange fluorescent dye and diluted to 0.2 mg/mL in PBS. The final concentration of SYPRO Orange was 10X. After an initial 10 minute incubation period at 25° C., proteins were heated from 25 to 95° C. using a heating rate of1° C/min. A fluorescence measurement was taken every 30 sec. Melting temperatures (Tm) were calculated using the instrument software. IL18 x Fab-Fc fusions had a first unfolding event (Tm1) of ˜40° C. Generally, the stability of IgG1 is limited by the Tm1 of the Fc region at 66° C. Therefore, a IgG1-based Fc fusion with a Tm1 of —40° C. is suboptimal. Accordingly, IL18 variants were engineered with the aim to improve stability, and these variants are referred to herein as stability variants.

[0371] 4B: Stepwise Reversion of C4S Substitutions

[0372] An initial avenue explored for improving stability was stepwise reversion of the substituted cysteines (from Example 2A) in the event that they were important for stability. Sequences of such IL18 variants are depicted in FIGS. 13A-13B and IL18 x Fab-Fc fusions based on these variants are depicted in FIGS. 22A-22CZ. In data not shown, restoration of cysteine at position 76 (i.e., C38S/C68S/C127S/D157_) improved Tm by 1.5° C. relative to 4CS/D157 in the context of IL18-G4S-His molecules.

[0373] 4C: Certain Affinity Variants Improves Stability

[0374] In engineering IL18 affinity variants as described in Example 3C, the E31Q substitution was unexpectedly found to improve stability. Stability of the IL18 x Fab-Fc fusions comprising the variants in Example 3C were investigated as described in Example 4A. It was found that while most of the IL18 x Fab-Fc fusions had a Tm1 ranging from 35.5-42.5° C., XENP38855 having the E31Q IL18 variant had a Tm1 of 45° C. (FIG. 36). Furthermore, the improved stability conferred by the E31Q substitution is retained when combined with other variants, such as the combination variants as described in Example 3D (data not shown). Additionally in engineering the additional single substitution affinity variants in Example 3D, it was surprisingly found that K53N, P57A, and P57E advantageously increased Tm1 respectively by 5, 9.5, and 12° C.; notably, several substitutions, including alternative substitutions as the aforementioned positions, decreased Tm1 by as much as 11.5° C. (FIG. 37).

[0375] 4D: Stability Variants (Library 1)

[0376] Several approaches were used in a first round of engineering. As in Example 3, MOE software's free energy calculations were used. The engineering focused on introducing disulfide bridges using existing cysteine residues, introducing disulfide bridges at novel sites, and mutating existing cysteine residues or core positions to hydrophobic residues. Additionally based on a sequence alignment of IL18 from various species such as Equus caballus, Bos taurus, and others (see FIG. 38), mutations to commonly observed residues were made. Based on these approaches, a number of IL18 variants were engineered (sequences for which are depicted in FIGS. 19A-19P; It should be noted that each of these stability variants include the 4CS substitutions, unless reversion to cysteine is explicitly denoted i.e., S38C, S68C, S76C, and/or S127C) and formatted as IL18 x Fab-Fc fusions (sequences for which are depicted in FIGS. 22A-22CZ). It should be noted that in the context of the IL18 x Fab-Fc fusions, the variants all include E31Q to improve production (and the 4CS substitutions, unless reversion to cysteine explicitly called out i.e. S38C, S68C, S76C, and/or S127C). The data as depicted in FIG. 39 show a number of the variants improved Tm1 by up to 20° C. (relative to the E31Q variant having Tm1 of 45° C.) such as the disulfide bridge introducing S10C/N155C variant. Melting curves for illustrative His-tagged IL18 variants are shown in FIG. 72. Notably, these stabilizing disulfide bridges were able to overcome the requirement for E31Q.

[0377] 4E: Stability Variants (Library 2)

[0378] Following the success from the first library of stability variants, a further library was made. The emphasis of this second library was to further explore native unpaired cysteines and mutate them to residues other than serine. Additionally, potentially interacting variants from the sequence alignment were mutated. Based on these approaches, a number of additional IL18 stability variants were engineered (sequences for which are depicted in FIGS. 20A-20D; It should be noted that each of these stability variants include the 4CS substitutions, unless alternative substitution at residues 38, 68, 76, and/or 127 is explicitly denoted e.g., S38E) and formatted as IL18 x Fab-Fc fusions (sequences for which are depicted in FIGS. 22A-22CZ). Stability was assayed as described in Example 4A, data for which are depicted in FIG. 40. As above, in the context of the IL18 x Fab-Fc fusions, the variants all include E31Q to improve production (and the 4CS substitutions, unless alternative substitution at residues 38, 68, 76, and/or 127 is explicitly denoted e.g., S38E). Notably, substitution of S38 for other residues such as L, I, or V improved stability. Restoration of cysteine at residue 76 improved stability which is consistent with findings as described in Example 4B. E141K/I149V and E141Q/I149V also enabled minor improvement in stability.

### Example 5

### Further IL18 Variants

[0379] Further IL18 variants were engineered based on the foregoing efforts. For example in Further Variants (Library 1), favorite stability variants identified in Example 4 were combined (sequences for which are depicted in FIG. 41).

[0380] In Further Variants (Library 2), favorite positions identified in Affinity Variants (Libraries 1 and 2) (see Example 3C and 3D) were revisited and alternative amino acids at these positions were explored. Additionally, further structural modeling identified S36 and D132 as additional potential positions for engineering affinity modulating variants. Sequences for Further Variants (Library 2) are depicted in FIG. 42.

[0381] As identified Stability Variants (Library 1) (see Example 4D), disulfide bridge introducing S10C/N155C variant improved Tm by 20° C. and is suitable for combining with other variants; thus in Further Variants (Library 3), favorite affinity variants were combined with S10C/N155C (sequences for which are depicted in FIG. 43).

[0382] As noted in Example 3D, K53D abrogated IL18BP binding, but also reduced IL18R1 and IL18R1xRAP binding. Additionally as described in Example 3D, certain variants found to improve IL18R1 binding could be used to restore IL18R1 binding (and, by extension, activity). Accordingly in Further Variants (Library 4), combination variants were explored combining affinity variants (those that modulate affinity for IL18 receptors and/or those that modulate affinity for IL18BP e.g. K53D) (sequences for which are depicted in FIG. 44). In particular, IL18R1 enhancing mutations combined with K53D included E6Q, S55T, and/or N111T. As depicted in FIG. 62, K53D as in XENP41762 resulted in >1000 fold reduction in potency relative to WT XENP41756. Incorporating E6Q and N111T as in XENP42006 resulted in —300 fold reduction in potency relative to WT XENP41756.

[0383] The new variants were formatted as IL18 x Fab-Fc or monovIL18-Fc fusions (sequences for which are depicted in FIGS. 21-22) and assayed as described in Example 3A and 3B, data for which are depicted in FIGS. 48-62 and 74. It should be noted that while 100 ng/mL IL18BP were previously utilized, 1 pg/mL IL18BP were utilized in some of these additional experiments. As will be described in Example 7A, it was found that IL18BP was upregulated by the IL18 fusion proteins of the invention, and therefore, IL18 variants that can tolerate higher concentrations of IL18BP would be preferred.

[0384] It should be noted that variants across the various libraries were often stepwise combined with previous favorites. For example, while Further Variants (Library 4) was exploring combinations of affinity variants, each of the variants depicted in FIG. 44 further includes 4CS and S10C/N155C. Accordingly, FIGS. 45-47 summarizes positions and substitutions that were explored for each purpose (e.g. Affinity Variants vs. Stability Variants).

### Example 6

### IL18 x Fab-Fc vs. monovIL18-Fc

[0385] As with the incorporation off E31Q and S10C/N155C, it is possible to express stable IL18 fusions as either IL18 x Fab-Fc or monovIL18-Fc, the activity of equivalent variants in either format was further investigated. The data depicted in FIG. 63 show that the IL18 x Fab-Fc fusions have lower Ymax (lower efficacy) than their monovIL18-Fc counterpart. This both suggests that it is difficult to compare variants between formats and that it is important that engineering efforts to “fix” monovIL18-Fc fusions (e.g. introducing novel disulfide bridges) were successful.

### Example 7

### In Vivo Characterization of Potency Reduced IL18 Fusions

[0386] To determine if the in vitro potency reduction in the IL18 fusions translated to activity in vivo, a graft-versus-host disease (GvHD) model conducted in NSG (NOD-SCID-gamma) immunodeficient mice was used. When the NSG mice are injected with human PBMCs, the human PBMCs develop an autoimmune response against mouse cells. Treatment of huPBMC-engrafted mice with IL18 fusions should activate and expand the engrafted human T cells and exacerbate disease.

[0387] 7A: GvHD Study #1

[0388] In a first study, the aim was to examine biological activities of potency reduced IL18 fusions and explore how potency can be reduced while still maintaining activity. 10 x 10⁶ were engrafted into NSG mice on Day 0 along with 5 mg/kg or 0.5 mg/kg XENP40967 (3-fold reduction from WT), XENP40685 (17-fold reduction from WT), XENP40966 (219-fold reduction from WT), XENP40962 (210-fold reduction from WT), and XENP40965 (9220-fold reduction from WT). Mice were further dosed on Days 7, 14, and 21. Mice were weighed twice a week (change in body weight as an indicator of GvHD), data for which are depicted in FIG. 64. Blood was drawn on Day 7, 14, and 21 to investigate cytokine secretion and lymphocyte expansion and activation, data for which are shown in FIGS. 65-69. The data show that change in body weight, human T cell expansion, NK cell expansion, and cytokine secretion generally correlated with IL18 potency and was dose dependent. Additionally, the body weights and T cell counts correlated with the variants that were engineered to avoid IL18BP inhibition. The effect is less pronounced at higher 5 mg/kg doses, but at lower 0.5 mg/kg doses, the K53T and K53D variants as in XENP40967 and XENP40962 noticeably enhanced GVHD. While K53T likely enhances GVHD due to its higher potency, K53D is lower potency but enhances GVHD in comparison to variants with similar potency but which do not avoid IL18BP inhibition. Notably as depicted in FIG. 65, the IL18 fusions induced IL18BP. This further highlights the importance of detuning IL18BP binding.

[0389] 7B: PK Study #1

[0390] To characterize the in vivo stability of the IL18 fusion proteins, PK experiments were performed in C57/B16 mice. Mice (n=4) were intravenously dosed on Day 0 with 2 mg/kg XENP39804 (monovIL18-Fc with 4CS/E31Q variant), XENP40685 (monovIL18-Fc with 4CS/E31Q variant and further including S 10C/N155C), and XENP40686 (IL18 x Fab-Fc with 4CS/E31Q variant and further including S10C/N155C). Blood was drawn 1 hour post dose and on Days 2, 5, 8, 13, and 16, and serum concentration of the IL18 fusion proteins was determined by anti-human IL18 detection antibody. PK interpretative analysis was performed using Phoenix WinNonlin software (Version 6.4.0.768) with PK parameters for non-compartmental analysis of free drug serum concentration versus time, data for which are shown in FIG. 70. The data show dramatic improvement in serum levels upon introduction of the S10C/N155C disulfide variant into the E31Q base and enabled antibody-like PK with an estimated half-life of 3 weeks.In addition, the IL18 x Fab-Fc format did not appear to confer any further improvements.

[0391] 7C: GvHD Study #2

[0392] In another study, dose dependent in vivo activity of XENP41770, XENP42006, and XENP41762 was investigated. 10 x 106 were engrafted into NSG mice on Day 0 along with indicated concentrations of XENP41770, XENP42006, and XENP41762. Mice were further dosed on Days 7, 14, 21, and 28. Mice were weighed twice a week (change in body weight as an indicator of GvHD), data for which are depicted in FIG. 75. Notably by Day 8, 3 mg/kg XENP42006 enabled earliest enhanced GvHD (i.e. significantly enhanced in comparison to PBS control). Over the course of the study, XENP42006 continued to outperform XENP41770 and XENP41762 even at lower doses. Blood was drawn on to investigate cytokine secretion and lymphocyte expansion, data for which are shown in FIGS. 76-77.

[0393] 7C: PK Study #2

[0394] Next, PK experiments were performed in cynomolgus monkeys. Monkeys were dosed on Day 0 and Day 14 with either XENP41974 (stabilized, WT affinity) and XENP42007 (stabilized, affinity-optimized which is XENP42006+M428L/N434S half-life extension Fc variant+Rapid Purification variant; note that XENP42143 is 42007 without the Rapid Purification variant). Data depicting total IL18-Fc vs. active IL18-Fc concentration over time are depicted in FIGS. 78-79. Total IL18-Fc includes IL18-Fc with and without bound IL18BP, while active IL18-Fc is unbound. The data show that active XENP41974 is rapidly cleared, while XENP42007 exhibits greatly improved PK (both slow receptor-mediated clearance and avoiding IL18BP sink). Additionally, the IL18-Fc was well tolerated and the cynomolgus monkeys exhibited no clinical observations.

### Example 8

### Further Characterization of Fc Variants

[0395] A majority of the data depicted herein were in the context of IL18 x Fab-Fc fusions or in the context of Fc fusions having Rapid Purification variants. Accordingly, it is important to confirm that the IL18 variants demonstrated their expected effect in the context of other Fc fusions havin alternative variants (e.g. having M428L/N434S half-life extension Fc variant and excluding the Rapid Purification variant). Accordingly, the in vitro activity of XENP42141, XENP42143, and XENP42145 were investigated in a cytokine release assay. Human PBMC was stimulated with the IL18-Fc fusions plus human IL-12 and secretion of cytokine IP-10 was assessed. As expected, the data as depicted in FIG. 81 show that XENP42141 having WT potency most potently induced IP10 secretion while XENP42145 least potently induced IP10 secretion with XENP42143 (having the potency restoring E6Q/N111T variants) falling in between.

### Example 9

### Identifying Additional IL18 Variants By Investigating Murine IL18

[0396] As depicted in Example 4D, engineering IL18 variants based on sequence alignment of IL18 from other species may be useful. Accordingly, additional murine IL18 variants were engineered (sequences as depicted in FIG. 80A-80P in the context of murine IL18-Fc fusions).

[0397] To screen these variants, mouse splenocytes were stimulated with murine IL18-Fc fusions plus murine IL-12 and activation of NK1.1 cells (indicated by % intracellular IFNγ+) was investigated, data for which are depicted in FIG. 82. Additionally, binding to murine IL18BP was also investigated as generally described herein, data for which are depicted in FIGS. 83. Collectively, the following observations were made: L59K dramatically lowers affinity to IL18BP with beneficial effect on receptor potency; L59K in combination with K52X knocks out IL18BP binding; E55R and M5OG are silent, even when combined with each other or with L59K; K52 variants modulates receptor affinity like corresponding K53 in human IL18 with K52A >K52V >K52D; E30 and D34 variants also modulate receptor affinity like corresponding E31 and D3 5 varinats in human IL18 (although does not modulate IL18BP binding). As K52 variants in murine IL18 demonstrated similar effect as corresponding K53 variants in human IL18 (*note: corresponding based on alignment in FIG. 38), it is expected that other murine variants (e.g. at L59, and in particular, L59K) convey similar effect in human IL18. Accordingly, for example, it is expected that M6OK in human IL18 (which corresponds to murine L59K based on alignment in FIG. 38) may reduce or knockout IL18BP binding and may be combined with K53 variants to further abrogate IL18BP binding. Similarly, it is expected that K53V in human IL18 may be useful in modulating receptor affinity.

The application's sequence listing, which the Patent Office published only in electronic form, follows.

SEQUENCE LISTING (1541 sequences)

SEQ ID NO: 1 - protein, 193 aa, Homo sapiens
  source 1..193: note = sp|Q14116|IL18_HUMAN Interleukin-18 OS=Homo sapiens; OX = 9606 GN=IL18 PE=1 SV=1 Human IL18 precursor sequence
MAAEPVEDNCINFVAMKFIDNTLYFIAEDDENLESDYFGKLESKLSVIRNLNDQVLFIDQGNRPLFEDMTDSDCRDNAPRTIFIISMYKDSQPRGMAVTISVKCEKISTLSCENKIISFKEMNPPDNIKDTKSDIIFFQRSVPGHDNKMQFESSSYEGYFLACEKERDLFKLILKKEDELGDRSIMFTVQNED

SEQ ID NO: 2 - protein, 157 aa, Homo sapiens
  source 1..157: note = sp|Q14116|37-193 Human IL18 mature form sequence
YFGKLESKLSVIRNLNDQVLFIDQGNRPLFEDMTDSDCRDNAPRTIFIISMYKDSQPRGMAVTISVKCEKISTLSCENKIISFKEMNPPDNIKDTKSDIIFFQRSVPGHDNKMQFESSSYEGYFLACEKERDLFKLILKKEDELGDRSIMFTVQNED

SEQ ID NO: 3 - protein, 541 aa, Homo sapiens
  source 1..541: note = sp|Q13478|IL18R_HUMAN Interleukin-18 receptor 1; OS = Homo sapiens OX=9606 GN=IL18R1 PE=1 SV=1 Human IL18 receptor 1 (IL18R1) sequence
MNCRELPLTLWVLISVSTAESCTSRPHITVVEGEPFYLKHCSCSLAHEIETTTKSWYKSSGSQEHVELNPRSSSRIALHDCVLEFWPVELNDTGSYFFQMKNYTQKWKLNVIRRNKHSCFTERQVTSKIVEVKKFFQITCENSYYQTLVNSTSLYKNCKKLLLENNKNPTIKKNAEFEDQGYYSCVHFLHHNGKLFNITKTFNITIVEDRSNIVPVLLGPKLNHVAVELGKNVRLNCSALLNEEDVIYWMFGEENGSDPNIHEEKEMRIMTPEGKWHASKVLRIENIGESNLNVLYNCTVASTGGTDTKSFILVRKADMADIPGHVFTRGMIIAVLILVAVVCLVTVCVIYRVDLVLFYRHLTRRDETLTDGKTYDAFVSYLKECRPENGEEHTFAVEILPRVLEKHFGYKLCIFERDVVPGGAVVDEIHSLIEKSRRLIIVLSKSYMSNEVRYELESGLHEALVERKIKIILIEFTPVTDFTFLPQSLKLLKSHRVLKWKADKSLSYNSRFWKNLLYLMPAKTVKPGRDEPEVLPVLSES

SEQ ID NO: 4 - protein, 308 aa, Homo sapiens
  source 1..308: note = sp|Q13478|22-329 Human IL18 receptor 1 (IL18R1), extracellular domain
CTSRPHITVVEGEPFYLKHCSCSLAHEIETTTKSWYKSSGSQEHVELNPRSSSRIALHDCVLEFWPVELNDTGSYFFQMKNYTQKWKLNVIRRNKHSCFTERQVTSKIVEVKKFFQITCENSYYQTLVNSTSLYKNCKKLLLENNKNPTIKKNAEFEDQGYYSCVHFLHHNGKLFNITKTFNITIVEDRSNIVPVLLGPKLNHVAVELGKNVRLNCSALLNEEDVIYWMFGEENGSDPNIHEEKEMRIMTPEGKWHASKVLRIENIGESNLNVLYNCTVASTGGTDTKSFILVRKADMADIPGHVFTR

SEQ ID NO: 5 - protein, 599 aa, Homo sapiens
  source 1..599: note = sp|O95256|I18RA_HUMAN Interleukin-18 receptor accessory protein OS=Homo sapiens OX=9606 GN=IL18RAP PE=1; SV = 1 Human IL18 receptor accessory protein (IL18RAP) sequence
MLCLGWIFLWLVAGERIKGFNISGCSTKKLLWTYSTRSEEEFVLFCDLPEPQKSHFCHRNRLSPKQVPEHLPFMGSNDLSDVQWYQQPSNGDPLEDIRKSYPHIIQDKCTLHFLTPGVNNSGSYICRPKMIKSPYDVACCVKMILEVKPQTNASCEYSASHKQDLLLGSTGSISCPSLSCQSDAQSPAVTWYKNGKLLSVERSNRIVVDEVYDYHQGTYVCDYTQSDTVSSWTVRAVVQVRTIVGDTKLKPDILDPVEDTLEVELGKPLTISCKARFGFERVFNPVIKWYIKDSDLEWEVSVPEAKSIKSTLKDEIIERNIILEKVTQRDLRRKFVCFVQNSIGNTTQSVQLKEKRGVVLLYILLGTIGTLVAVLAASALLYRHWIEIVLLYRTYQSKDQTLGDKKDFDAFVSYAKWSSFPSEATSSLSEEHLALSLFPDVLENKYGYSLCLLERDVAPGGVYAEDIVSIIKRSRRGIFILSPNYVNGPSIFELQAAVNLALDDQTLKLILIKFCYFQEPESLPHLVKKALRVLPTVTWRGLKSVPPNSRFWAKMRYHMPVKNSQGFTWNQLRITSRIFQWKGLSRTETTGRSSQPKEW

SEQ ID NO: 6 - protein, 337 aa, Homo sapiens
  source 1..337: note = sp|O95256|20-356 Human IL18 receptor accessory protein (IL18RAP), extracellular domain
FNISGCSTKKLLWTYSTRSEEEFVLFCDLPEPQKSHFCHRNRLSPKQVPEHLPFMGSNDLSDVQWYQQPSNGDPLEDIRKSYPHIIQDKCTLHFLTPGVNNSGSYICRPKMIKSPYDVACCVKMILEVKPQTNASCEYSASHKQDLLLGSTGSISCPSLSCQSDAQSPAVTWYKNGKLLSVERSNRIVVDEVYDYHQGTYVCDYTQSDTVSSWTVRAVVQVRTIVGDTKLKPDILDPVEDTLEVELGKPLTISCKARFGFERVFNPVIKWYIKDSDLEWEVSVPEAKSIKSTLKDEIIERNIILEKVTQRDLRRKFVCFVQNSIGNTTQSVQLKEKR

SEQ ID NO: 7 - protein, 194 aa, Homo sapiens
  source 1..194: note = sp|O95998|I18BP_HUMAN Interleukin-18-binding protein; OS = Homo sapiens OX=9606 GN=IL18BP PE=1 SV=2 Human IL18 Binding Protein (IL18BP) precursor sequence
MTMRHNWTPDLSPLWVLLLCAHVVTLLVRATPVSQTTTAATASVRSTKDPCPSQPPVFPAAKQCPALEVTWPEVEVPLNGTLSLSCVACSRFPNFSILYWLGNGSFIEHLPGRLWEGSTSRERGSTGTQLCKALVLEQLTPALHSTNFSCVLVDPEQVVQRHVVLAQLWAGLRATLPPTQEALPSSHSSPQQQG

SEQ ID NO: 8 - protein, 164 aa, Homo sapiens
  source 1..164: note = sp|O95998|31-194 Human IL18 Binding Protein (IL18BP) mature form sequence
TPVSQTTTAATASVRSTKDPCPSQPPVFPAAKQCPALEVTWPEVEVPLNGTLSLSCVACSRFPNFSILYWLGNGSFIEHLPGRLWEGSTSRERGSTGTQLCKALVLEQLTPALHSTNFSCVLVDPEQVVQRHVVLAQLWAGLRATLPPTQEALPSSHSSPQQQG

SEQ ID NO: 9 - protein, 192 aa, Mus musculus
  source 1..192: note = sp|P70380|IL18_MOUSE Interleukin-18 OS=Mus musculus; OX = 10090 GN=Il18 PE=1 SV=2 Mouse IL18 precursor sequence
MAAMSEDSCVNFKEMMFIDNTLYFIPEENGDLESDNFGRLHCTTAVIRNINDQVLFVDKRQPVFEDMTDIDQSASEPQTRLIIYMYKDSEVRGLAVTLSVKDSKMSTLSCKNKIISFEEMDPPENIDDIQSDLIFFQKRVPGHNKMEFESSLYEGHFLACQKEDDAFKLILKKKDENGDKSVMFTLTNLHQS

SEQ ID NO: 10 - protein, 157 aa, Mus musculus
  source 1..157: note = sp|P70380|36-192 Mouse IL18 mature form sequence
NFGRLHCTTAVIRNINDQVLFVDKRQPVFEDMTDIDQSASEPQTRLIIYMYKDSEVRGLAVTLSVKDSKMSTLSCKNKIISFEEMDPPENIDDIQSDLIFFQKRVPGHNKMEFESSLYEGHFLACQKEDDAFKLILKKKDENGDKSVMFTLTNLHQS

SEQ ID NO: 11 - protein, 537 aa, Mus musculus
  source 1..537: note = sp|Q61098|IL18R_MOUSE Interleukin-18 receptor 1; OS = Mus musculus OX=10090 GN=Il18r1 PE=1 SV=1 Mouse IL18 receptor 1 (IL18R1) sequence
MHHEELILTLCILIVKSASKSCIHRSQIHVVEGEPFYLKPCGISAPVHRNETATMRWFKGSASHEYRELNNRSSPRVTFHDHTLEFWPVEMEDEGTYISQVGNDRRNWTLNVTKRNKHSCFSDKLVTSRDVEVNKSLHITCKNPNYEELIQDTWLYKNCKEISKTPRILKDAEFGDEGYYSCVFSVHHNGTRYNITKTVNITVIEGRSKVTPAILGPKCEKVGVELGKDVELNCSASLNKDDLFYWSIRKEDSSDPNVQEDRKETTTWISEGKLHASKILRFQKITENYLNVLYNCTVANEEAIDTKSFVLVRKEIPDIPGHVFTGGVTVLVLASVAAVCIVILCVIYKVDLVLFYRRIAERDETLTDGKTYDAFVSYLKECHPENKEEYTFAVETLPRVLEKQFGYKLCIFERDVVPGGAVVEEIHSLIEKSRRLIIVLSQSYLTNGARRELESGLHEALVERKIKIILIEFTPASNITFLPPSLKLLKSYRVLKWRADSPSMNSRFWKNLVYLMPAKAVKPWREESEARSVLSAP

SEQ ID NO: 12 - protein, 307 aa, Mus musculus
  source 1..307: note = sp|Q61098|20-326 Mouse IL18 receptor 1 (IL18R1), extracellular domain
KSCIHRSQIHVVEGEPFYLKPCGISAPVHRNETATMRWFKGSASHEYRELNNRSSPRVTFHDHTLEFWPVEMEDEGTYISQVGNDRRNWTLNVTKRNKHSCFSDKLVTSRDVEVNKSLHITCKNPNYEELIQDTWLYKNCKEISKTPRILKDAEFGDEGYYSCVFSVHHNGTRYNITKTVNITVIEGRSKVTPAILGPKCEKVGVELGKDVELNCSASLNKDDLFYWSIRKEDSSDPNVQEDRKETTTWISEGKLHASKILRFQKITENYLNVLYNCTVANEEAIDTKSFVLVRKEIPDIPGHVFTG

SEQ ID NO: 13 - protein, 614 aa, Mus musculus
  source 1..614: note = sp|Q9Z2B1|I18RA_MOUSE Interleukin-18 receptor accessory protein OS=Mus musculus OX=10090 GN=Il18rap PE=2; SV = 1 Mouse IL18 receptor accessory protein (IL18RAP) sequence
MLCLGWVFLWFVAGEKTTGFNHSACATKKLLWTYSARGAENFVLFCDLQELQEQKFSHASQLSPTQSPAHKPCSGSQKDLSDVQWYMQPRSGSPLEEISRNSPHMQSEGMLHILAPQTNSIWSYICRPRIRSPQDMACCIKTVLEVKPQRNVSCGNTAQDEQVLLLGSTGSIHCPSLSCQSDVQSPEMTWYKDGRLLPEHKKNPIEMADIYVFNQGLYVCDYTQSDNVSSWTVRAVVKVRTIGKDINVKPEILDPITDTLDVELGKPLTLPCRVQFGFQRLSKPVIKWYVKESTQEWEMSVFEEKRIQSTFKNEVIERTIFLREVTQRDLSRKFVCFAQNSIGNTTRTIRLRKKEEVVFVYILLGTALMLVGVLVAAAFLYWYWIEVVLLCRTYKNKDETLGDKKEFDAFVSYSNWSSPETDAVGSLSEEHLALNLFPEVLEDTYGYRLCLLDRDVTPGGVYADDIVSIIKKSRRGIFILSPSYLNGPRVFELQAAVNLALVDQTLKLILIKFCSFQEPESLPYLVKKALRVLPTVTWKGLKSVHASSRFWTQIRYHMPVKNSNRFMFNGLRIFLKGFSPEKDLVTQKPLEGMPKSGNDHGAQNLLLYSDQKRC

SEQ ID NO: 14 - protein, 337 aa, Mus musculus
  source 1..337: note = sp|Q9Z2B1|20-356 Mouse IL18 receptor accessory protein (IL18RAP), extracellular domain
FNHSACATKKLLWTYSARGAENFVLFCDLQELQEQKFSHASQLSPTQSPAHKPCSGSQKDLSDVQWYMQPRSGSPLEEISRNSPHMQSEGMLHILAPQTNSIWSYICRPRIRSPQDMACCIKTVLEVKPQRNVSCGNTAQDEQVLLLGSTGSIHCPSLSCQSDVQSPEMTWYKDGRLLPEHKKNPIEMADIYVFNQGLYVCDYTQSDNVSSWTVRAVVKVRTIGKDINVKPEILDPITDTLDVELGKPLTLPCRVQFGFQRLSKPVIKWYVKESTQEWEMSVFEEKRIQSTFKNEVIERTIFLREVTQRDLSRKFVCFAQNSIGNTTRTIRLRKKEE

SEQ ID NO: 15 - protein, 193 aa, Mus musculus
  source 1..193: note = sp|Q9Z0M9|I18BP_MOUSE Interleukin-18-binding protein; OS = Mus musculus OX=10090 GN=Il18bp PE=1 SV=2 Mouse IL18 Binding Protein (IL18BP) precursor sequence
MTMRHCWTAGPSSWWVLLLYVHVILARATSAPQTTATVLTGSSKDPCSSWSPAVPTKQYPALDVIWPEKEVPLNGTLTLSCTACSRFPYFSILYWLGNGSFIEHLPGRLKEGHTSREHRNTSTWLHRALVLEELSPTLRSTNFSCLFVDPGQVAQYHIILAQLWDGLKTAPSPSQETLSSHSPVSRSAGPGVA

SEQ ID NO: 16 - protein, 165 aa, Mus musculus
  source 1..165: note = sp|Q9Z0M9|29-193 Mouse IL18 Binding Protein (IL18BP) mature form sequence
TSAPQTTATVLTGSSKDPCSSWSPAVPTKQYPALDVIWPEKEVPLNGTLTLSCTACSRFPYFSILYWLGNGSFIEHLPGRLKEGHTSREHRNTSTWLHRALVLEELSPTLRSTNFSCLFVDPGQVAQYHIILAQLWDGLKTAPSPSQETLSSHSPVSRSAGPGVA

SEQ ID NO: 17 - protein, 193 aa, Macaca fascicularis
  source 1..193: note = tr|A0A2K5TJ84|A0A2K5TJ84_MACFA Interleukin-18; OS = Macaca fascicularis OX=9541 GN=IL18 PE=3 SV=1 Cynomolgus IL18 precursor sequence
MAAEPAEDNCINFVAMKFIDSTLYFIAEDDENLESDYFGKLESKLSIIRNLNDQVLFIDQGNRPLFEDMTDSDCRDNAPRTIFIINMYKDSQPRGMAVAISVKCEKISTLSCENRIISFKEMNPPDNIKDTKSDIIFFQRSVPGHDNKMQFESSSYEGYFLACEKERDLYKLILKKKDELGDRSIMFTVQNED

SEQ ID NO: 18 - protein, 157 aa, Macaca fascicularis
  source 1..157: note = tr|A0A2K5TJ84|37-193 Cynomolgus IL18 mature form sequence
YFGKLESKLSIIRNLNDQVLFIDQGNRPLFEDMTDSDCRDNAPRTIFIINMYKDSQPRGMAVAISVKCEKISTLSCENRIISFKEMNPPDNIKDTKSDIIFFQRSVPGHDNKMQFESSSYEGYFLACEKERDLYKLILKKKDELGDRSIMFTVQNED

SEQ ID NO: 19 - protein, 540 aa, Macaca fascicularis
  source 1..540: note = tr|A0A2K5V3J9|A0A2K5V3J9_MACFA Interleukin 18 receptor 1 OS=Macaca fascicularis OX=9541 GN=IL18R1 PE=3; SV = 2 Cynomolgus IL18 receptor 1 (IL18R1) sequence
MNCRGLPLTLWVLIFVSTAESCTSRPHITVVEGEPFYLKYCSCSPAHEIETITKSWYKSSGSQERVELNPRSSSRIALHGCVLEFWPVELNDTGSYSFQMENYTQKWKLNVIRRNKHRCFTERQVTSKTVEVKKFLQITCENSYYQTLVNSTSLYKNCKKLLENNKNPTIKKNAELEDRGYYSCVHFLHHNGKLFNITKTFNITIVEDHSNIVPVLLGPKLNHVAVELGKDVRLNCSALLNEEDVVYWMFGEENGSDPNIHEEKEIRIMTSEGKWHASRVLRIENIGENNLNVLYNCTVASTGGTDTKSFILVRKADMADIPGHVFTRGMIIAVLILVAVVCLVTVCVIYRVDLVLFYRHLMRRDETLTDGKTYDAFVSYLKECRPENGEEHTFAVEILPRVLEKHFGYKLCIFERDVVPGGAVVDEIHSLIEKSRRLIIVLSKSYMSNEVRYELESGLHEALVERKIKIILIEFTPVTDFTFLPQSLKLLKSHRVLKWKADKSLSYNSRFWKNLLYLMPAKTAKPGRDESEVLPVLSES

SEQ ID NO: 20 - protein, 307 aa, Macaca fascicularis
  source 1..307: note = tr|A0A2K5V3J9|22-329 Cynomolgus IL18 receptor 1 (IL18R1), extracellular domain
CTSRPHITVVEGEPFYLKYCSCSPAHEIETITKSWYKSSGSQERVELNPRSSSRIALHGCVLEFWPVELNDTGSYSFQMENYTQKWKLNVIRRNKHRCFTERQVTSKTVEVKKFLQITCENSYYQTLVNSTSLYKNCKKLLENNKNPTIKKNAELEDRGYYSCVHFLHHNGKLFNITKTFNITIVEDHSNIVPVLLGPKLNHVAVELGKDVRLNCSALLNEEDVVYWMFGEENGSDPNIHEEKEIRIMTSEGKWHASRVLRIENIGENNLNVLYNCTVASTGGTDTKSFILVRKADMADIPGHVFTR

SEQ ID NO: 21 - protein, 603 aa, Macaca fascicularis
  source 1..603: note = tr|A0A2K5VDC3|A0A2K5VDC3_MACFA Interleukin 18 receptor accessory protein OS=Macaca fascicularis OX=9541; GN = IL18RAP PE=3 SV=2 Cynomolgus IL18 receptor accessory protein (IL18RAP) sequence
MLYLGWMFLWLVSGERIKGFNISGCSTKKLLWAYSTRSEEEFILFCDLPEPQKSHFCHRSQLSPTQVPDHLPFTDSKDLPDVQWYRQPSNGDPLEDIRKSYPHIIQDKCTLRFLTPGVNNTGSYICRPKMIKSPYDVACCVKMILEVKPQSNASCENSASHKQDLLLGSTGSISCPSLSCQSDAQSPEVTWYKNGKLLSMTRSNRIVVDEVYIYHQGTYVCDYTQSDTASSWTVRAVVQVRTIVGDTKLKPDILDPVESTLEVELGKPLTISCKARFGFERVFNPLMKWYIKDADLEWEVSVPEAKSIKSTLKDEIIERNIILEKVTQRDLRRTFVCFVQNSIGNTTQSVQLKEKRGGPVSTVVLLYILLGTIGTLVAVLVASALLYRHWIEIVLLYRTYQSKDETLGDKKDFDAFVSYAKWSSFPSEATSSLTEEHLALSLFPDVLENKYGYTLCLLERDVAPGGVYAEDIVSVIKRSRRGIFILSPNYVNGPSIFELQAAVNLALDDQTLKLILIKFCYFQEPESLPHLVKKALRVLPTVTWRGLKSVPPNSRFWTKMRYHMPVKNSQGFTWSQLRITSRIFQWKGLSTTETTGRSSQPKE

SEQ ID NO: 22 - protein, 337 aa, Macaca fascicularis
  source 1..337: note = tr|A0A2K5VDC3|20-356 Cynomolgus IL18 receptor accessory protein (IL18RAP), extracellular domain
FNISGCSTKKLLWAYSTRSEEEFILFCDLPEPQKSHFCHRSQLSPTQVPDHLPFTDSKDLPDVQWYRQPSNGDPLEDIRKSYPHIIQDKCTLRFLTPGVNNTGSYICRPKMIKSPYDVACCVKMILEVKPQSNASCENSASHKQDLLLGSTGSISCPSLSCQSDAQSPEVTWYKNGKLLSMTRSNRIVVDEVYIYHQGTYVCDYTQSDTASSWTVRAVVQVRTIVGDTKLKPDILDPVESTLEVELGKPLTISCKARFGFERVFNPLMKWYIKDADLEWEVSVPEAKSIKSTLKDEIIERNIILEKVTQRDLRRTFVCFVQNSIGNTTQSVQLKEKR

SEQ ID NO: 23 - protein, 207 aa, Macaca fascicularis
  source 1..207: note = tr|A0A2K5UDJ4|A0A2K5UDJ4_MACFA Interleukin-18-binding protein OS=Macaca fascicularis; OX = 9541 GN=EGM_05991 PE=4 SV=1 Cynomolgus IL18 Binding Protein (IL18BP) precursor sequence
MRHNWTPDLSFLWVLLCAHIITLLVRATPVSQTTTAATASSRSTKDPCPSQPPVFPAAKQCPALEVTWPEVEMPLNGTLTLSCTACSRFPNFSMLYWLGNGSFIEHLPGQLWEGSTSREHGSTGTRLYKALVLEQLTPALHSTNFSCVLMDPEQVVQRHVILAQLWAGLRTTLPPTQEALPSSHSTGPQQPTAAGLRLSTGPAAARP

SEQ ID NO: 24 - protein, 165 aa, Macaca fascicularis
  source 1..165: note = tr|A0A2K5UDJ4|28-192 Cynomolgus IL18 Binding Protein (IL18BP) mature form sequence
TPVSQTTTAATASSRSTKDPCPSQPPVFPAAKQCPALEVTWPEVEMPLNGTLTLSCTACSRFPNFSMLYWLGNGSFIEHLPGQLWEGSTSREHGSTGTRLYKALVLEQLTPALHSTNFSCVLMDPEQVVQRHVILAQLWAGLRTTLPPTQEALPSSHSTGPQQPT

SEQ ID NO: 25 - protein, 5 aa, synthetic construct
  source 1..5: note = Useful domain linkers (GGGGS)1 or GGGGS or G4S
GGGGS

SEQ ID NO: 26 - protein, 10 aa, synthetic construct
  source 1..10: note = Useful domain linkers (GGGGS)2 or (G4S)2
GGGGSGGGGS

SEQ ID NO: 27 - protein, 15 aa, synthetic construct
  source 1..15: note = Useful domain linkers (GGGGS)3 or (G4S)3
GGGGSGGGGSGGGGS

SEQ ID NO: 28 - protein, 20 aa, synthetic construct
  source 1..20: note = Useful domain linkers (GGGGS)4 or (G4S)4
GGGGSGGGGSGGGGSGGGGS

SEQ ID NO: 29 - protein, 25 aa, synthetic construct
  source 1..25: note = Useful domain linkers (GGGGS)5 or (G4S)5
GGGGSGGGGSGGGGSGGGGSGGGGS

SEQ ID NO: 30 - protein, 30 aa, synthetic construct
  source 1..30: note = Useful domain linkers (GGGGS)6 or (G4S)6
GGGGSGGGGSGGGGSGGGGSGGGGSGGGGS

SEQ ID NO: 31 - protein, 35 aa, synthetic construct
  source 1..35: note = Useful domain linkers (GGGGS)7 or (G4S)7
GGGGSGGGGSGGGGSGGGGSGGGGSGGGGSGGGGS

SEQ ID NO: 32 - protein, 5 aa, synthetic construct
  source 1..5: note = Useful domain linkers (GGGGA)1 or GGGGA
GGGGA

SEQ ID NO: 33 - protein, 10 aa, synthetic construct
  source 1..10: note = Useful domain linkers (GGGGA)2 or (G4A)2
GGGGAGGGGA

SEQ ID NO: 34 - protein, 15 aa, synthetic construct
  source 1..15: note = Useful domain linkers (GGGGA)3 or (G4A)3
GGGGAGGGGAGGGGA

SEQ ID NO: 35 - protein, 20 aa, synthetic construct
  source 1..20: note = Useful domain linkers (GGGGA)4 or (G4A)4
GGGGAGGGGAGGGGAGGGGA

SEQ ID NO: 36 - protein, 25 aa, synthetic construct
  source 1..25: note = Useful domain linkers (GGGGA)5 or (G4A)5
GGGGAGGGGAGGGGAGGGGAGGGGA

SEQ ID NO: 37 - protein, 30 aa, synthetic construct
  source 1..30: note = Useful domain linkers (GGGGA)6 or (G4A)6
GGGGAGGGGAGGGGAGGGGAGGGGAGGGGA

SEQ ID NO: 38 - protein, 35 aa, synthetic construct
  source 1..35: note = Useful domain linkers (GGGGA)7 or (G4A)7
GGGGAGGGGAGGGGAGGGGAGGGGAGGGGAGGGGA

SEQ ID NO: 39 - protein, 5 aa, synthetic construct
  source 1..5: note = Useful domain linkers AGGGG or AG4
AGGGG

SEQ ID NO: 40 - protein, 5 aa, synthetic construct
  source 1..5: note = Useful domain linkers EAAAK or EA3K
EAAAK

SEQ ID NO: 41 - protein, 30 aa, synthetic construct
  source 1..30: note = Useful domain linkers 30AA-linker
DPALVHQRPAPPGGGGSGGGGSGGGGSGGG

SEQ ID NO: 42 - protein, 5 aa, synthetic construct
  source 1..5: note = Useful domain linkers (GKPGS)1 or GKPGS
GKPGS

SEQ ID NO: 43 - protein, 25 aa, synthetic construct
  source 1..25: note = Useful domain linkers (GKPGS)5
GKPGSGKPGSGKPGSGKPGSGKPGS

SEQ ID NO: 44 - protein, 30 aa, synthetic construct
  source 1..30: note = Useful domain linkers (GKPGS)6
GKPGSGKPGSGKPGSGKPGSGKPGSGKPGS

SEQ ID NO: 45 - protein, 5 aa, synthetic construct
  source 1..5: note = Useful domain linkers (GGGES)1 or GGGES
GGGES

SEQ ID NO: 46 - protein, 15 aa, synthetic construct
  source 1..15: note = Useful domain linkers "hinge"
EPKSCDKTHTCPPCP

SEQ ID NO: 47 - protein, 9 aa, synthetic construct
  source 1..9: note = Useful domain linkers "lower half hinge"
KTHTCPPCP

SEQ ID NO: 48 - protein, 15 aa, synthetic construct
  source 1..15: note = Useful domain linkers "full hinge C220S variant"
EPKSSDKTHTCPPCP

SEQ ID NO: 49 - protein, 19 aa, synthetic construct
  source 1..19: note = Useful domain linkers "flex lower half hinge"
GGGGSGGGGSKTHTCPPCP

SEQ ID NO: 50 - protein, 19 aa, synthetic construct
  source 1..19: note = Useful domain linkers "charged lower half hinge1"
GKPGSGKPGSKTHTCPPCP

SEQ ID NO: 51 - protein, 14 aa, synthetic construct
  source 1..14: note = Useful domain linkers "charged lower half hinge2"
GKPGSKTHTCPPCP

SEQ ID NO: 52 - protein, 216 aa, synthetic construct
  source 1..216: note = Heterodimeric Fc Backbone 1 monomer 1 (-)
APPVAGPSVFLFPPKPKDTLMISRTPEVTCVVVDVKHEDPEVKFNWYVDGVEVHNAKTKPREEEYNSTYRVVSVLTVLHQDWLNGKEYKCKVSNKALPAPIEKTISKAKGQPREPQVYTLPPSREEMTKNQVSLTCDVSGFYPSDIAVEWESDGQPENNYKTTPPVLDSDGSFFLYSKLTVDKSRWEQGDVFSCSVMHEALHNHYTQKSLSLSPGK

SEQ ID NO: 53 - protein, 216 aa, synthetic construct
  source 1..216: note = Heterodimeric Fc Backbone 1 monomer 2 (+)
APPVAGPSVFLFPPKPKDTLMISRTPEVTCVVVDVKHEDPEVKFNWYVDGVEVHNAKTKPREEQYNSTYRVVSVLTVLHQDWLNGKEYKCKVSNKALPAPIEKTISKAKGQPREPQVYTLPPSREQMTKNQVKLTCLVKGFYPSDIAVEWESNGQPENNYKTTPPVLDSDGSFFLYSKLTVDKSRWQQGNVFSCSVMHEALHNHYTQKSLSLSPGK

SEQ ID NO: 54 - protein, 216 aa, synthetic construct; identical to SEQ ID NO: 52
  source 1..216: note = Heterodimeric Fc Backbone 2 monomer 1 (-)

SEQ ID NO: 55 - protein, 216 aa, synthetic construct
  source 1..216: note = Heterodimeric Fc Backbone 2 monomer 2 (+)
APPVAGPSVFLFPPKPKDTLMISRTPEVTCVVVDVKHEDPEVKFNWYVDGVEVHNAKTKPREEQYNSTYRVVSVLTVLHQDWLNGKEYKCKVSNKALPAPIEKTISKAKGQPREPQVYTLPPSREEMTKNQVKLTCLVKGFYPSDIAVEWESNGQPENNYKTTPPVLDSDGSFFLYSKLTVDKSRWQQGNVFSCSVMHEALHNHYTQKSLSLSPGK

SEQ ID NO: 56 - protein, 216 aa, synthetic construct
  source 1..216: note = Heterodimeric Fc Backbone 3 monomer 1 (-)
APPVAGPSVFLFPPKPKDTLMISRTPEVTCVVVDVKHEDPEVKFNWYVDGVEVHNAKTKPREEEYNSTYRVVSVLTVLHQDWLNGKEYKCKVSNKALPAPIEKTISKAKGQPREPQVYTLPPSREEMTKNQVSLTCEVSGFYPSDIAVEWESDGQPENNYKTTPPVLDSDGSFFLYSKLTVDKSRWEQGDVFSCSVMHEALHNHYTQKSLSLSPGK

SEQ ID NO: 57 - protein, 216 aa, synthetic construct; identical to SEQ ID NO: 55
  source 1..216: note = Heterodimeric Fc Backbone 3 monomer 2 (+)

SEQ ID NO: 58 - protein, 216 aa, synthetic construct
  source 1..216: note = Heterodimeric Fc Backbone 4 monomer 1 (-)
APPVAGPSVFLFPPKPKDTLMISRTPEVTCVVVDVKHEDPEVKFNWYVDGVEVHNAKTKPREEEYNSTYRVVSVLTVLHQDWLNGKEYKCKVSNKALPAPIEKTISKAKGQPREPQVYTLPPSREEMTENEVSLTCLVKGFYPSDIAVEWESDGQPENNYKTTPPVLDSDGSFFLYSKLEVDKSRWEQGDVFSCSVMHEALHNHYTQKSLSLSPGK

SEQ ID NO: 59 - protein, 216 aa, synthetic construct
  source 1..216: note = Heterodimeric Fc Backbone 4 monomer 2 (+)
APPVAGPSVFLFPPKPKDTLMISRTPEVTCVVVDVKHEDPEVKFNWYVDGVEVHNAKTKPREEQYNSTYRVVSVLTVLHQDWLNGKEYKCKVSNKALPAPIEKTISKAKGQPREPQVYTLPPSREEMTKNQVSLTCLVKGFYPSDIAVEWESNGQPENNYKTTPPVLDSKGSFFLYSKLTVDKSRWQQGNVFSCSVMHEALHNHYTQKSLSLSPGK

SEQ ID NO: 60 - protein, 216 aa, synthetic construct
  source 1..216: note = Heterodimeric Fc Backbone 5 monomer 1 (-)
APPVAGPSVFLFPPKPKDTLMISRTPEVTCVVVDVKHEDPEVKFNWYVDGVEVHNAKTKPREEEYNSTYRVVSVLTVLHQDWLNGKEYKCKVSNKALPAPIEKTISKAKGQPREPQVYTLPPSRDELTKNQVSLTCDVSGFYPSDIAVEWESDGQPENNYKTTPPVLDSDGSFFLYSKLTVDKSRWEQGDVFSCSVMHEALHNHYTQKSLSLSPGK

SEQ ID NO: 61 - protein, 216 aa, synthetic construct
  source 1..216: note = Heterodimeric Fc Backbone 5 monomer 2 (+)
APPVAGPSVFLFPPKPKDTLMISRTPEVTCVVVDVKHEDPEVKFNWYVDGVEVHNAKTKPREEQYNSTYRVVSVLTVLHQDWLNGKEYKCKVSNKALPAPIEKTISKAKGQPREPQVYTLPPSRDQLTKNQVKLTCLVKGFYPSDIAVEWESNGQPENNYKTTPPVLDSDGSFFLYSKLTVDKSRWQQGNVFSCSVMHEALHNHYTQKSLSLSPGK

SEQ ID NO: 62 - protein, 216 aa, synthetic construct
  source 1..216: note = Heterodimeric Fc Backbone 6 monomer 1 (-)
APPVAGPSVFLFPPKPKDTLMISRTPEVTCVVVDVKHEDPEVKFNWYVDGVEVHNAKTKPREEEYASTYRVVSVLTVLHQDWLNGKEYKCKVSNKALPAPIEKTISKAKGQPREPQVYTLPPSREEMTKNQVSLTCDVSGFYPSDIAVEWESDGQPENNYKTTPPVLDSDGSFFLYSKLTVDKSRWEQGDVFSCSVMHEALHNHYTQKSLSLSPGK

SEQ ID NO: 63 - protein, 216 aa, synthetic construct
  source 1..216: note = Heterodimeric Fc Backbone 6 monomer 2 (+)
APPVAGPSVFLFPPKPKDTLMISRTPEVTCVVVDVKHEDPEVKFNWYVDGVEVHNAKTKPREEQYASTYRVVSVLTVLHQDWLNGKEYKCKVSNKALPAPIEKTISKAKGQPREPQVYTLPPSREQMTKNQVKLTCLVKGFYPSDIAVEWESNGQPENNYKTTPPVLDSDGSFFLYSKLTVDKSRWQQGNVFSCSVMHEALHNHYTQKSLSLSPGK

SEQ ID NO: 64 - protein, 216 aa, synthetic construct
  source 1..216: note = Heterodimeric Fc Backbone 7 monomer 1 (-)
APPVAGPSVFLFPPKPKDTLMISRTPEVTCVVVDVKHEDPEVKFNWYVDGVEVHNAKTKPREEEYSSTYRVVSVLTVLHQDWLNGKEYKCKVSNKALPAPIEKTISKAKGQPREPQVYTLPPSREEMTKNQVSLTCDVSGFYPSDIAVEWESDGQPENNYKTTPPVLDSDGSFFLYSKLTVDKSRWEQGDVFSCSVMHEALHNHYTQKSLSLSPGK

SEQ ID NO: 65 - protein, 216 aa, synthetic construct
  source 1..216: note = Heterodimeric Fc Backbone 7 monomer 2 (+)
APPVAGPSVFLFPPKPKDTLMISRTPEVTCVVVDVKHEDPEVKFNWYVDGVEVHNAKTKPREEQYSSTYRVVSVLTVLHQDWLNGKEYKCKVSNKALPAPIEKTISKAKGQPREPQVYTLPPSREQMTKNQVKLTCLVKGFYPSDIAVEWESNGQPENNYKTTPPVLDSDGSFFLYSKLTVDKSRWQQGNVFSCSVMHEALHNHYTQKSLSLSPGK

SEQ ID NO: 66 - protein, 217 aa, synthetic construct
  source 1..217: note = Heterodimeric Fc Backbone 8 monomer 1 (-)
APEFLGGPSVFLFPPKPKDTLMISRTPEVTCVVVDVSQEDPEVQFNWYVDGVEVHNAKTKPREEEFNSTYRVVSVLTVLHQDWLNGKEYKCKVSNKGLPSSIEKTISKAKGQPREPQVYTLPPSQEEMTKNQVSLTCDVSGFYPSDIAVEWESDGQPENNYKTTPPVLDSDGSFFLYSRLTVDKSRWEEGDVFSCSVMHEALHNHYTQKSLSLSLGK

SEQ ID NO: 67 - protein, 217 aa, synthetic construct
  source 1..217: note = Heterodimeric Fc Backbone 8 monomer 2 (+)
APEFLGGPSVFLFPPKPKDTLMISRTPEVTCVVVDVSQEDPEVQFNWYVDGVEVHNAKTKPREEQFNSTYRVVSVLTVLHQDWLNGKEYKCKVSNKGLPSSIEKTISKAKGQPREPQVYTLPPSQEQMTKNQVKLTCLVKGFYPSDIAVEWESNGQPENNYKTTPPVLDSDGSFFLYSRLTVDKSRWQEGNVFSCSVMHEALHNHYTQKSLSLSLGK

SEQ ID NO: 68 - protein, 216 aa, synthetic construct
  source 1..216: note = Heterodimeric Fc Backbone 9 monomer 1 (-)
APPVAGPSVFLFPPKPKDTLMISRTPEVTCVVVDVSHEDPEVQFNWYVDGVEVHNAKTKPREEEFNSTFRVVSVLTVVHQDWLNGKEYKCKVSNKGLPAPIEKTISKTKGQPREPQVYTLPPSREEMTKNQVSLTCDVSGFYPSDIAVEWESDGQPENNYKTTPPMLDSDGSFFLYSKLTVDKSRWEQGDVFSCSVMHEALHNHYTQKSLSLSPGK

SEQ ID NO: 69 - protein, 216 aa, synthetic construct
  source 1..216: note = Heterodimeric Fc Backbone 9 monomer 2 (+)
APPVAGPSVFLFPPKPKDTLMISRTPEVTCVVVDVSHEDPEVQFNWYVDGVEVHNAKTKPREEQFNSTFRVVSVLTVVHQDWLNGKEYKCKVSNKGLPAPIEKTISKTKGQPREPQVYTLPPSREQMTKNQVKLTCLVKGFYPSDIAVEWESNGQPENNYKTTPPMLDSDGSFFLYSKLTVDKSRWQQGNVFSCSVMHEALHNHYTQKSLSLSPGK

SEQ ID NO: 70 - protein, 216 aa, synthetic construct
  source 1..216: note = Heterodimeric Fc Backbone 10 monomer 1 (-)
APPVAGPSVFLFPPKPKDTLMISRTPEVTCVVVDVKHEDPEVQFNWYVDGVEVHNAKTKPREEEFNSTFRVVSVLTVVHQDWLNGKEYKCKVSNKGLPAPIEKTISKTKGQPREPQVYTLPPSREEMTKNQVSLTCDVSGFYPSDIAVEWESDGQPENNYKTTPPMLDSDGSFFLYSKLTVDKSRWEQGDVFSCSVMHEALHNHYTQKSLSLSPGK

SEQ ID NO: 71 - protein, 216 aa, synthetic construct
  source 1..216: note = Heterodimeric Fc Backbone 10 monomer 2 (+)
APPVAGPSVFLFPPKPKDTLMISRTPEVTCVVVDVKHEDPEVQFNWYVDGVEVHNAKTKPREEQFNSTFRVVSVLTVVHQDWLNGKEYKCKVSNKGLPAPIEKTISKTKGQPREPQVYTLPPSREQMTKNQVKLTCLVKGFYPSDIAVEWESNGQPENNYKTTPPMLDSDGSFFLYSKLTVDKSRWQQGNVFSCSVMHEALHNHYTQKSLSLSPGK

SEQ ID NO: 72 - protein, 216 aa, synthetic construct
  source 1..216: note = Heterodimeric Fc Backbone 11 monomer 1 (-)
APPVAGPSVFLFPPKPKDTLMISRTPEVTCVVVDVKHEDPEVKFNWYVDGVEVHNAKTKPREEEYNSTYRVVSVLTVLHQDWLNGKEYKCKVSNKALPAPIEKTISKAKGQPREPQVYTLPPSREEMTKNQVSLTCDVSGFYPSDIAVEWESDGQPENNYKTTPPVLDSDGSFFLYSKLTVDKSRWEQGDVFSCSVLHEALHSHYTQKSLSLSPGK

SEQ ID NO: 73 - protein, 216 aa, synthetic construct
  source 1..216: note = Heterodimeric Fc Backbone 11 monomer 2 (+)
APPVAGPSVFLFPPKPKDTLMISRTPEVTCVVVDVKHEDPEVKFNWYVDGVEVHNAKTKPREEQYNSTYRVVSVLTVLHQDWLNGKEYKCKVSNKALPAPIEKTISKAKGQPREPQVYTLPPSREQMTKNQVKLTCLVKGFYPSDIAVEWESNGQPENNYKTTPPVLDSDGSFFLYSKLTVDKSRWQQGNVFSCSVLHEALHSHYTQKSLSLSPGK

SEQ ID NO: 74 - protein, 216 aa, synthetic construct
  source 1..216: note = Heterodimeric Fc Backbone 12 monomer 1 (-)
APPVAGPSVFLFPPKPKDTLMISRTPEVTCVVVDVKHEDPEVKFKWYVDGVEVHNAKTKPREEQYNSTYRVVSVLTVLHQDWLNGKEYKCKVSNKALPAPIEKTISKAKGQPREPQVYTLPPSREQMTKNQVKLTCLVKGFYPSDIAVEWESNGQPENNYKTTPPVLDSDGSFFLYSKLTVDKSRWQQGNVFSCSVMHEALHNHYTQKSLSLSPGK

SEQ ID NO: 75 - protein, 216 aa, synthetic construct; identical to SEQ ID NO: 52
  source 1..216: note = Heterodimeric Fc Backbone 12 monomer 2 (+)

SEQ ID NO: 76 - protein, 98 aa, synthetic construct
  source 1..98: note = IgG1 CH1 (+ side)
ASTKGPSVFPLAPSSKSTSGGTAALGCLVKDYFPEPVTVSWNSGALTSGVHTFPAVLQSSGLYSLSSVVTVPSSSLGTQTYICNVNHKPSNTKVDKKV

SEQ ID NO: 77 - protein, 98 aa, synthetic construct
  source 1..98: note = IgG2 CH1 (+ side)
ASTKGPSVFPLAPCSRSTSESTAALGCLVKDYFPEPVTVSWNSGALTSGVHTFPAVLQSSGLYSLSSVVTVPSSNFGTQTYTCNVDHKPSNTKVDKTV

SEQ ID NO: 78 - protein, 98 aa, synthetic construct
  source 1..98: note = IgG4 CH1 (+ side)
ASTKGPSVFPLAPCSRSTSESTAALGCLVKDYFPEPVTVSWNSGALTSGVHTFPAVLQSSGLYSLSSVVTVPSSSLGTKTYTCNVDHKPSNTKVDKRV

SEQ ID NO: 79 - protein, 98 aa, synthetic construct
  source 1..98: note = IgG1 CH1 (- side)
ASTKGPSVFPLAPSSKSTSGGTAALGCLVKDYFPEPVTVSWNSGALTSGVHTFPAVLQSSGLYSLSSVVTVPSSSLGTQTYICNVNHKPSDTKVDKKV

SEQ ID NO: 80 - protein, 98 aa, synthetic construct
  source 1..98: note = IgG2 CH1 (- side)
ASTKGPSVFPLAPCSRSTSESTAALGCLVKDYFPEPVTVSWNSGALTSGVHTFPAVLQSSGLYSLSSVVTVPSSNFGTQTYTCNVDHKPSDTKVDKTV

SEQ ID NO: 81 - protein, 98 aa, synthetic construct
  source 1..98: note = IgG4 CH1 (- side)
ASTKGPSVFPLAPCSRSTSESTAALGCLVKDYFPEPVTVSWNSGALTSGVHTFPAVLQSSGLYSLSSVVTVPSSSLGTKTYTCNVDHKPSDTKVDKRV

SEQ ID NO: 82 - protein, 107 aa, synthetic construct [sequence omitted]

SEQ ID NO: 83 - protein, 106 aa, synthetic construct
  source 1..106: note = Constant Light Chain -  Lambda
GQPKAAPSVTLFPPSSEELQANKATLVCLISDFYPGAVTVAWKADSSPVKAGVETTTPSKQSNNKYAASSYLSLTPEQWKSHRSYSCQVTHEGSTVEKTVAPTECS

SEQ ID NO: 84 - protein, 157 aa, synthetic construct
  source 1..157: note = human IL18 (C38S)
YFGKLESKLSVIRNLNDQVLFIDQGNRPLFEDMTDSDSRDNAPRTIFIISMYKDSQPRGMAVTISVKCEKISTLSCENKIISFKEMNPPDNIKDTKSDIIFFQRSVPGHDNKMQFESSSYEGYFLACEKERDLFKLILKKEDELGDRSIMFTVQNED

SEQ ID NO: 85 - protein, 157 aa, synthetic construct
  source 1..157: note = human IL18 (C38S/C68S)
YFGKLESKLSVIRNLNDQVLFIDQGNRPLFEDMTDSDSRDNAPRTIFIISMYKDSQPRGMAVTISVKSEKISTLSCENKIISFKEMNPPDNIKDTKSDIIFFQRSVPGHDNKMQFESSSYEGYFLACEKERDLFKLILKKEDELGDRSIMFTVQNED

SEQ ID NO: 86 - protein, 157 aa, synthetic construct
  source 1..157: note = human IL18 (C38S/C76S)
YFGKLESKLSVIRNLNDQVLFIDQGNRPLFEDMTDSDSRDNAPRTIFIISMYKDSQPRGMAVTISVKCEKISTLSSENKIISFKEMNPPDNIKDTKSDIIFFQRSVPGHDNKMQFESSSYEGYFLACEKERDLFKLILKKEDELGDRSIMFTVQNED

SEQ ID NO: 87 - protein, 157 aa, synthetic construct
  source 1..157: note = human IL18 (C38S/C127S)
YFGKLESKLSVIRNLNDQVLFIDQGNRPLFEDMTDSDSRDNAPRTIFIISMYKDSQPRGMAVTISVKCEKISTLSCENKIISFKEMNPPDNIKDTKSDIIFFQRSVPGHDNKMQFESSSYEGYFLASEKERDLFKLILKKEDELGDRSIMFTVQNED

SEQ ID NO: 88 - protein, 157 aa, synthetic construct; identical to SEQ ID NO: 85
  source 1..157: note = human IL18 (C38S/C68S/C76S)

SEQ ID NO: 89 - protein, 157 aa, synthetic construct
  source 1..157: note = human IL18 (C38S/C68S/C127S)
YFGKLESKLSVIRNLNDQVLFIDQGNRPLFEDMTDSDSRDNAPRTIFIISMYKDSQPRGMAVTISVKSEKISTLSCENKIISFKEMNPPDNIKDTKSDIIFFQRSVPGHDNKMQFESSSYEGYFLASEKERDLFKLILKKEDELGDRSIMFTVQNED

SEQ ID NO: 90 - protein, 157 aa, synthetic construct
  source 1..157: note = human IL18 (C38S/C76S/C127S)
YFGKLESKLSVIRNLNDQVLFIDQGNRPLFEDMTDSDSRDNAPRTIFIISMYKDSQPRGMAVTISVKCEKISTLSSENKIISFKEMNPPDNIKDTKSDIIFFQRSVPGHDNKMQFESSSYEGYFLASEKERDLFKLILKKEDELGDRSIMFTVQNED

SEQ ID NO: 91 - protein, 157 aa, synthetic construct
  source 1..157: note = human IL18 (C68S)
YFGKLESKLSVIRNLNDQVLFIDQGNRPLFEDMTDSDCRDNAPRTIFIISMYKDSQPRGMAVTISVKSEKISTLSCENKIISFKEMNPPDNIKDTKSDIIFFQRSVPGHDNKMQFESSSYEGYFLACEKERDLFKLILKKEDELGDRSIMFTVQNED

SEQ ID NO: 92 - protein, 157 aa, synthetic construct
  source 1..157: note = human IL18 (C68S/C76S)
YFGKLESKLSVIRNLNDQVLFIDQGNRPLFEDMTDSDCRDNAPRTIFIISMYKDSQPRGMAVTISVKSEKISTLSSENKIISFKEMNPPDNIKDTKSDIIFFQRSVPGHDNKMQFESSSYEGYFLACEKERDLFKLILKKEDELGDRSIMFTVQNED

SEQ ID NO: 93 - protein, 157 aa, synthetic construct
  source 1..157: note = human IL18 (C68S/C127S)
YFGKLESKLSVIRNLNDQVLFIDQGNRPLFEDMTDSDCRDNAPRTIFIISMYKDSQPRGMAVTISVKSEKISTLSCENKIISFKEMNPPDNIKDTKSDIIFFQRSVPGHDNKMQFESSSYEGYFLASEKERDLFKLILKKEDELGDRSIMFTVQNED

SEQ ID NO: 94 - protein, 157 aa, synthetic construct
  source 1..157: note = human IL18 (C68S/C76S/C127S)
YFGKLESKLSVIRNLNDQVLFIDQGNRPLFEDMTDSDCRDNAPRTIFIISMYKDSQPRGMAVTISVKSEKISTLSSENKIISFKEMNPPDNIKDTKSDIIFFQRSVPGHDNKMQFESSSYEGYFLASEKERDLFKLILKKEDELGDRSIMFTVQNED

SEQ ID NO: 95 - protein, 157 aa, synthetic construct
  source 1..157: note = human IL18 (C76S)
YFGKLESKLSVIRNLNDQVLFIDQGNRPLFEDMTDSDCRDNAPRTIFIISMYKDSQPRGMAVTISVKCEKISTLSSENKIISFKEMNPPDNIKDTKSDIIFFQRSVPGHDNKMQFESSSYEGYFLACEKERDLFKLILKKEDELGDRSIMFTVQNED

SEQ ID NO: 96 - protein, 157 aa, synthetic construct
  source 1..157: note = human IL18 (C76S/C127S)
YFGKLESKLSVIRNLNDQVLFIDQGNRPLFEDMTDSDCRDNAPRTIFIISMYKDSQPRGMAVTISVKCEKISTLSSENKIISFKEMNPPDNIKDTKSDIIFFQRSVPGHDNKMQFESSSYEGYFLASEKERDLFKLILKKEDELGDRSIMFTVQNED

SEQ ID NO: 97 - protein, 157 aa, synthetic construct
  source 1..157: note = human IL18 (C127S)
YFGKLESKLSVIRNLNDQVLFIDQGNRPLFEDMTDSDCRDNAPRTIFIISMYKDSQPRGMAVTISVKCEKISTLSCENKIISFKEMNPPDNIKDTKSDIIFFQRSVPGHDNKMQFESSSYEGYFLASEKERDLFKLILKKEDELGDRSIMFTVQNED

SEQ ID NO: 98 - protein, 157 aa, synthetic construct
  source 1..157: note = IL18 (C38S/C68S/C76S/C127S a.k.a. 4CS a.k.a. WT-4CS)
YFGKLESKLSVIRNLNDQVLFIDQGNRPLFEDMTDSDSRDNAPRTIFIISMYKDSQPRGMAVTISVKSEKISTLSSENKIISFKEMNPPDNIKDTKSDIIFFQRSVPGHDNKMQFESSSYEGYFLASEKERDLFKLILKKEDELGDRSIMFTVQNED

SEQ ID NO: 99 - protein, 156 aa, synthetic construct
  source 1..156: note = IL18_D157del or D157_
YFGKLESKLSVIRNLNDQVLFIDQGNRPLFEDMTDSDCRDNAPRTIFIISMYKDSQPRGMAVTISVKCEKISTLSCENKIISFKEMNPPDNIKDTKSDIIFFQRSVPGHDNKMQFESSSYEGYFLACEKERDLFKLILKKEDELGDRSIMFTVQNE

SEQ ID NO: 100 - protein, 157 aa, synthetic construct
  source 1..157: note = IL18_D157S
YFGKLESKLSVIRNLNDQVLFIDQGNRPLFEDMTDSDCRDNAPRTIFIISMYKDSQPRGMAVTISVKCEKISTLSCENKIISFKEMNPPDNIKDTKSDIIFFQRSVPGHDNKMQFESSSYEGYFLACEKERDLFKLILKKEDELGDRSIMFTVQNES

SEQ ID NO: 101 - protein, 157 aa, synthetic construct
  source 1..157: note = IL18_D157A
YFGKLESKLSVIRNLNDQVLFIDQGNRPLFEDMTDSDCRDNAPRTIFIISMYKDSQPRGMAVTISVKCEKISTLSCENKIISFKEMNPPDNIKDTKSDIIFFQRSVPGHDNKMQFESSSYEGYFLACEKERDLFKLILKKEDELGDRSIMFTVQNEA

SEQ ID NO: 102 - protein, 157 aa, synthetic construct
  source 1..157: note = human_IL18_Y1F
FFGKLESKLSVIRNLNDQVLFIDQGNRPLFEDMTDSDCRDNAPRTIFIISMYKDSQPRGMAVTISVKCEKISTLSCENKIISFKEMNPPDNIKDTKSDIIFFQRSVPGHDNKMQFESSSYEGYFLACEKERDLFKLILKKEDELGDRSIMFTVQNED

SEQ ID NO: 103 - protein, 157 aa, synthetic construct
  source 1..157: note = human_IL18_Y1H
HFGKLESKLSVIRNLNDQVLFIDQGNRPLFEDMTDSDCRDNAPRTIFIISMYKDSQPRGMAVTISVKCEKISTLSCENKIISFKEMNPPDNIKDTKSDIIFFQRSVPGHDNKMQFESSSYEGYFLACEKERDLFKLILKKEDELGDRSIMFTVQNED

SEQ ID NO: 104 - protein, 157 aa, synthetic construct
  source 1..157: note = human_IL18_E6A
YFGKLASKLSVIRNLNDQVLFIDQGNRPLFEDMTDSDCRDNAPRTIFIISMYKDSQPRGMAVTISVKCEKISTLSCENKIISFKEMNPPDNIKDTKSDIIFFQRSVPGHDNKMQFESSSYEGYFLACEKERDLFKLILKKEDELGDRSIMFTVQNED

SEQ ID NO: 105 - protein, 157 aa, synthetic construct
  source 1..157: note = human_IL18_E6Q
YFGKLQSKLSVIRNLNDQVLFIDQGNRPLFEDMTDSDCRDNAPRTIFIISMYKDSQPRGMAVTISVKCEKISTLSCENKIISFKEMNPPDNIKDTKSDIIFFQRSVPGHDNKMQFESSSYEGYFLACEKERDLFKLILKKEDELGDRSIMFTVQNED

SEQ ID NO: 106 - protein, 157 aa, synthetic construct
  source 1..157: note = human_IL18_D17N
YFGKLESKLSVIRNLNNQVLFIDQGNRPLFEDMTDSDCRDNAPRTIFIISMYKDSQPRGMAVTISVKCEKISTLSCENKIISFKEMNPPDNIKDTKSDIIFFQRSVPGHDNKMQFESSSYEGYFLACEKERDLFKLILKKEDELGDRSIMFTVQNED

SEQ ID NO: 107 - protein, 157 aa, synthetic construct
  source 1..157: note = human_IL18_E31Q
YFGKLESKLSVIRNLNDQVLFIDQGNRPLFQDMTDSDCRDNAPRTIFIISMYKDSQPRGMAVTISVKCEKISTLSCENKIISFKEMNPPDNIKDTKSDIIFFQRSVPGHDNKMQFESSSYEGYFLACEKERDLFKLILKKEDELGDRSIMFTVQNED

SEQ ID NO: 108 - protein, 157 aa, synthetic construct
  source 1..157: note = human_IL18_D35N
YFGKLESKLSVIRNLNDQVLFIDQGNRPLFEDMTNSDCRDNAPRTIFIISMYKDSQPRGMAVTISVKCEKISTLSCENKIISFKEMNPPDNIKDTKSDIIFFQRSVPGHDNKMQFESSSYEGYFLACEKERDLFKLILKKEDELGDRSIMFTVQNED

SEQ ID NO: 109 - protein, 157 aa, synthetic construct
  source 1..157: note = human_IL18_D37N
YFGKLESKLSVIRNLNDQVLFIDQGNRPLFEDMTDSNSRDNAPRTIFIISMYKDSQPRGMAVTISVKCEKISTLSCENKIISFKEMNPPDNIKDTKSDIIFFQRSVPGHDNKMQFESSSYEGYFLACEKERDLFKLILKKEDELGDRSIMFTVQNED

SEQ ID NO: 110 - protein, 157 aa, synthetic construct
  source 1..157: note = human_IL18_D40N
YFGKLESKLSVIRNLNDQVLFIDQGNRPLFEDMTDSDCRNNAPRTIFIISMYKDSQPRGMAVTISVKCEKISTLSCENKIISFKEMNPPDNIKDTKSDIIFFQRSVPGHDNKMQFESSSYEGYFLACEKERDLFKLILKKEDELGDRSIMFTVQNED

SEQ ID NO: 111 - protein, 157 aa, synthetic construct
  source 1..157: note = human_IL18_N41Q
YFGKLESKLSVIRNLNDQVLFIDQGNRPLFEDMTDSDCRDQAPRTIFIISMYKDSQPRGMAVTISVKCEKISTLSCENKIISFKEMNPPDNIKDTKSDIIFFQRSVPGHDNKMQFESSSYEGYFLACEKERDLFKLILKKEDELGDRSIMFTVQNED

SEQ ID NO: 112 - protein, 157 aa, synthetic construct
  source 1..157: note = human_IL18_K53R
YFGKLESKLSVIRNLNDQVLFIDQGNRPLFEDMTDSDCRDNAPRTIFIISMYRDSQPRGMAVTISVKCEKISTLSCENKIISFKEMNPPDNIKDTKSDIIFFQRSVPGHDNKMQFESSSYEGYFLACEKERDLFKLILKKEDELGDRSIMFTVQNED

SEQ ID NO: 113 - protein, 157 aa, synthetic construct
  source 1..157: note = human_IL18_K53H
YFGKLESKLSVIRNLNDQVLFIDQGNRPLFEDMTDSDCRDNAPRTIFIISMYHDSQPRGMAVTISVKCEKISTLSCENKIISFKEMNPPDNIKDTKSDIIFFQRSVPGHDNKMQFESSSYEGYFLACEKERDLFKLILKKEDELGDRSIMFTVQNED

SEQ ID NO: 114 - protein, 157 aa, synthetic construct
  source 1..157: note = human_IL18_K53M
YFGKLESKLSVIRNLNDQVLFIDQGNRPLFEDMTDSDCRDNAPRTIFIISMYMDSQPRGMAVTISVKCEKISTLSCENKIISFKEMNPPDNIKDTKSDIIFFQRSVPGHDNKMQFESSSYEGYFLACEKERDLFKLILKKEDELGDRSIMFTVQNED

SEQ ID NO: 115 - protein, 157 aa, synthetic construct
  source 1..157: note = human_IL18_K53E
YFGKLESKLSVIRNLNDQVLFIDQGNRPLFEDMTDSDCRDNAPRTIFIISMYEDSQPRGMAVTISVKCEKISTLSCENKIISFKEMNPPDNIKDTKSDIIFFQRSVPGHDNKMQFESSSYEGYFLACEKERDLFKLILKKEDELGDRSIMFTVQNED

SEQ ID NO: 116 - protein, 157 aa, synthetic construct
  source 1..157: note = human_IL18_K53Q
YFGKLESKLSVIRNLNDQVLFIDQGNRPLFEDMTDSDCRDNAPRTIFIISMYQDSQPRGMAVTISVKCEKISTLSCENKIISFKEMNPPDNIKDTKSDIIFFQRSVPGHDNKMQFESSSYEGYFLACEKERDLFKLILKKEDELGDRSIMFTVQNED

SEQ ID NO: 117 - protein, 157 aa, synthetic construct
  source 1..157: note = human_IL18_K53A
YFGKLESKLSVIRNLNDQVLFIDQGNRPLFEDMTDSDCRDNAPRTIFIISMYADSQPRGMAVTISVKCEKISTLSCENKIISFKEMNPPDNIKDTKSDIIFFQRSVPGHDNKMQFESSSYEGYFLACEKERDLFKLILKKEDELGDRSIMFTVQNED

SEQ ID NO: 118 - protein, 157 aa, synthetic construct
  source 1..157: note = human_IL18_Q103E
YFGKLESKLSVIRNLNDQVLFIDQGNRPLFEDMTDSDCRDNAPRTIFIISMYKDSQPRGMAVTISVKCEKISTLSCENKIISFKEMNPPDNIKDTKSDIIFFERSVPGHDNKMQFESSSYEGYFLACEKERDLFKLILKKEDELGDRSIMFTVQNED

SEQ ID NO: 119 - protein, 157 aa, synthetic construct
  source 1..157: note = human_IL18_D110N
YFGKLESKLSVIRNLNDQVLFIDQGNRPLFEDMTDSDCRDNAPRTIFIISMYKDSQPRGMAVTISVKCEKISTLSCENKIISFKEMNPPDNIKDTKSDIIFFQRSVPGHNNKMQFESSSYEGYFLACEKERDLFKLILKKEDELGDRSIMFTVQNED

SEQ ID NO: 120 - protein, 157 aa, synthetic construct
  source 1..157: note = human_IL18_N111Q
YFGKLESKLSVIRNLNDQVLFIDQGNRPLFEDMTDSDCRDNAPRTIFIISMYKDSQPRGMAVTISVKCEKISTLSCENKIISFKEMNPPDNIKDTKSDIIFFQRSVPGHDQKMQFESSSYEGYFLACEKERDLFKLILKKEDELGDRSIMFTVQNED

SEQ ID NO: 121 - protein, 157 aa, synthetic construct
  source 1..157: note = human_IL18_K53S
YFGKLESKLSVIRNLNDQVLFIDQGNRPLFEDMTDSDCRDNAPRTIFIISMYSDSQPRGMAVTISVKCEKISTLSCENKIISFKEMNPPDNIKDTKSDIIFFQRSVPGHDNKMQFESSSYEGYFLACEKERDLFKLILKKEDELGDRSIMFTVQNED

SEQ ID NO: 122 - protein, 157 aa, synthetic construct
  source 1..157: note = human_IL18_K53G
YFGKLESKLSVIRNLNDQVLFIDQGNRPLFEDMTDSDCRDNAPRTIFIISMYGDSQPRGMAVTISVKCEKISTLSCENKIISFKEMNPPDNIKDTKSDIIFFQRSVPGHDNKMQFESSSYEGYFLACEKERDLFKLILKKEDELGDRSIMFTVQNED

SEQ ID NO: 123 - protein, 157 aa, synthetic construct
  source 1..157: note = human_IL18_K53T
YFGKLESKLSVIRNLNDQVLFIDQGNRPLFEDMTDSDCRDNAPRTIFIISMYTDSQPRGMAVTISVKCEKISTLSCENKIISFKEMNPPDNIKDTKSDIIFFQRSVPGHDNKMQFESSSYEGYFLACEKERDLFKLILKKEDELGDRSIMFTVQNED

SEQ ID NO: 124 - protein, 157 aa, synthetic construct
  source 1..157: note = human_IL18_K53I
YFGKLESKLSVIRNLNDQVLFIDQGNRPLFEDMTDSDCRDNAPRTIFIISMYIDSQPRGMAVTISVKCEKISTLSCENKIISFKEMNPPDNIKDTKSDIIFFQRSVPGHDNKMQFESSSYEGYFLACEKERDLFKLILKKEDELGDRSIMFTVQNED

SEQ ID NO: 125 - protein, 157 aa, synthetic construct
  source 1..157: note = human_IL18_K53L
YFGKLESKLSVIRNLNDQVLFIDQGNRPLFEDMTDSDCRDNAPRTIFIISMYLDSQPRGMAVTISVKCEKISTLSCENKIISFKEMNPPDNIKDTKSDIIFFQRSVPGHDNKMQFESSSYEGYFLACEKERDLFKLILKKEDELGDRSIMFTVQNED

SEQ ID NO: 126 - protein, 157 aa, synthetic construct
  source 1..157: note = human_IL18_K53N
YFGKLESKLSVIRNLNDQVLFIDQGNRPLFEDMTDSDCRDNAPRTIFIISMYNDSQPRGMAVTISVKCEKISTLSCENKIISFKEMNPPDNIKDTKSDIIFFQRSVPGHDNKMQFESSSYEGYFLACEKERDLFKLILKKEDELGDRSIMFTVQNED

SEQ ID NO: 127 - protein, 157 aa, synthetic construct
  source 1..157: note = human_IL18_K53D
YFGKLESKLSVIRNLNDQVLFIDQGNRPLFEDMTDSDCRDNAPRTIFIISMYDDSQPRGMAVTISVKCEKISTLSCENKIISFKEMNPPDNIKDTKSDIIFFQRSVPGHDNKMQFESSSYEGYFLACEKERDLFKLILKKEDELGDRSIMFTVQNED

SEQ ID NO: 128 - protein, 157 aa, synthetic construct
  source 1..157: note = human_IL18_M51K
YFGKLESKLSVIRNLNDQVLFIDQGNRPLFEDMTDSDCRDNAPRTIFIISKYKDSQPRGMAVTISVKCEKISTLSCENKIISFKEMNPPDNIKDTKSDIIFFQRSVPGHDNKMQFESSSYEGYFLACEKERDLFKLILKKEDELGDRSIMFTVQNED

SEQ ID NO: 129 - protein, 157 aa, synthetic construct
  source 1..157: note = human_IL18_M51Q
YFGKLESKLSVIRNLNDQVLFIDQGNRPLFEDMTDSDCRDNAPRTIFIISQYKDSQPRGMAVTISVKCEKISTLSCENKIISFKEMNPPDNIKDTKSDIIFFQRSVPGHDNKMQFESSSYEGYFLACEKERDLFKLILKKEDELGDRSIMFTVQNED

SEQ ID NO: 130 - protein, 157 aa, synthetic construct
  source 1..157: note = human_IL18_M51I
YFGKLESKLSVIRNLNDQVLFIDQGNRPLFEDMTDSDCRDNAPRTIFIISIYKDSQPRGMAVTISVKCEKISTLSCENKIISFKEMNPPDNIKDTKSDIIFFQRSVPGHDNKMQFESSSYEGYFLACEKERDLFKLILKKEDELGDRSIMFTVQNED

SEQ ID NO: 131 - protein, 157 aa, synthetic construct
  source 1..157: note = human_IL18_S55N
YFGKLESKLSVIRNLNDQVLFIDQGNRPLFEDMTDSDCRDNAPRTIFIISMYKDNQPRGMAVTISVKCEKISTLSCENKIISFKEMNPPDNIKDTKSDIIFFQRSVPGHDNKMQFESSSYEGYFLACEKERDLFKLILKKEDELGDRSIMFTVQNED

SEQ ID NO: 132 - protein, 157 aa, synthetic construct
  source 1..157: note = human_IL18_S55Q
YFGKLESKLSVIRNLNDQVLFIDQGNRPLFEDMTDSDCRDNAPRTIFIISMYKDQQPRGMAVTISVKCEKISTLSCENKIISFKEMNPPDNIKDTKSDIIFFQRSVPGHDNKMQFESSSYEGYFLACEKERDLFKLILKKEDELGDRSIMFTVQNED

SEQ ID NO: 133 - protein, 157 aa, synthetic construct
  source 1..157: note = human_IL18_Q56L
YFGKLESKLSVIRNLNDQVLFIDQGNRPLFEDMTDSDCRDNAPRTIFIISMYKDSLPRGMAVTISVKCEKISTLSCENKIISFKEMNPPDNIKDTKSDIIFFQRSVPGHDNKMQFESSSYEGYFLACEKERDLFKLILKKEDELGDRSIMFTVQNED

SEQ ID NO: 134 - protein, 157 aa, synthetic construct
  source 1..157: note = human_IL18_Q56I
YFGKLESKLSVIRNLNDQVLFIDQGNRPLFEDMTDSDCRDNAPRTIFIISMYKDSIPRGMAVTISVKCEKISTLSCENKIISFKEMNPPDNIKDTKSDIIFFQRSVPGHDNKMQFESSSYEGYFLACEKERDLFKLILKKEDELGDRSIMFTVQNED

SEQ ID NO: 135 - protein, 157 aa, synthetic construct
  source 1..157: note = human_IL18_P57A
YFGKLESKLSVIRNLNDQVLFIDQGNRPLFEDMTDSDCRDNAPRTIFIISMYKDSQARGMAVTISVKCEKISTLSCENKIISFKEMNPPDNIKDTKSDIIFFQRSVPGHDNKMQFESSSYEGYFLACEKERDLFKLILKKEDELGDRSIMFTVQNED

SEQ ID NO: 136 - protein, 157 aa, synthetic construct
  source 1..157: note = human_IL18_P57E
YFGKLESKLSVIRNLNDQVLFIDQGNRPLFEDMTDSDCRDNAPRTIFIISMYKDSQERGMAVTISVKCEKISTLSCENKIISFKEMNPPDNIKDTKSDIIFFQRSVPGHDNKMQFESSSYEGYFLACEKERDLFKLILKKEDELGDRSIMFTVQNED

SEQ ID NO: 137 - protein, 157 aa, synthetic construct
  source 1..157: note = human_IL18_M60L
YFGKLESKLSVIRNLNDQVLFIDQGNRPLFEDMTDSDCRDNAPRTIFIISMYKDSQPRGLAVTISVKCEKISTLSCENKIISFKEMNPPDNIKDTKSDIIFFQRSVPGHDNKMQFESSSYEGYFLACEKERDLFKLILKKEDELGDRSIMFTVQNED

SEQ ID NO: 138 - protein, 157 aa, synthetic construct
  source 1..157: note = human_IL18_M60I
YFGKLESKLSVIRNLNDQVLFIDQGNRPLFEDMTDSDCRDNAPRTIFIISMYKDSQPRGIAVTISVKCEKISTLSCENKIISFKEMNPPDNIKDTKSDIIFFQRSVPGHDNKMQFESSSYEGYFLACEKERDLFKLILKKEDELGDRSIMFTVQNED

SEQ ID NO: 139 - protein, 157 aa, synthetic construct
  source 1..157: note = human_IL18_K8Y
YFGKLESYLSVIRNLNDQVLFIDQGNRPLFEDMTDSDCRDNAPRTIFIISMYKDSQPRGMAVTISVKCEKISTLSCENKIISFKEMNPPDNIKDTKSDIIFFQRSVPGHDNKMQFESSSYEGYFLACEKERDLFKLILKKEDELGDRSIMFTVQNED

SEQ ID NO: 140 - protein, 157 aa, synthetic construct
  source 1..157: note = human_IL18_K8Q
YFGKLESQLSVIRNLNDQVLFIDQGNRPLFEDMTDSDCRDNAPRTIFIISMYKDSQPRGMAVTISVKCEKISTLSCENKIISFKEMNPPDNIKDTKSDIIFFQRSVPGHDNKMQFESSSYEGYFLACEKERDLFKLILKKEDELGDRSIMFTVQNED

SEQ ID NO: 141 - protein, 157 aa, synthetic construct
  source 1..157: note = human_IL18_K8E
YFGKLESELSVIRNLNDQVLFIDQGNRPLFEDMTDSDCRDNAPRTIFIISMYKDSQPRGMAVTISVKCEKISTLSCENKIISFKEMNPPDNIKDTKSDIIFFQRSVPGHDNKMQFESSSYEGYFLACEKERDLFKLILKKEDELGDRSIMFTVQNED

SEQ ID NO: 142 - protein, 157 aa, synthetic construct
  source 1..157: note = human_IL18_H109W
YFGKLESKLSVIRNLNDQVLFIDQGNRPLFEDMTDSDCRDNAPRTIFIISMYKDSQPRGMAVTISVKCEKISTLSCENKIISFKEMNPPDNIKDTKSDIIFFQRSVPGWDNKMQFESSSYEGYFLACEKERDLFKLILKKEDELGDRSIMFTVQNED

SEQ ID NO: 143 - protein, 157 aa, synthetic construct
  source 1..157: note = human_IL18_H109Y
YFGKLESKLSVIRNLNDQVLFIDQGNRPLFEDMTDSDCRDNAPRTIFIISMYKDSQPRGMAVTISVKCEKISTLSCENKIISFKEMNPPDNIKDTKSDIIFFQRSVPGYDNKMQFESSSYEGYFLACEKERDLFKLILKKEDELGDRSIMFTVQNED

SEQ ID NO: 144 - protein, 157 aa, synthetic construct
  source 1..157: note = human_IL18_E31Q_K53A
YFGKLESKLSVIRNLNDQVLFIDQGNRPLFQDMTDSDCRDNAPRTIFIISMYADSQPRGMAVTISVKCEKISTLSCENKIISFKEMNPPDNIKDTKSDIIFFQRSVPGHDNKMQFESSSYEGYFLACEKERDLFKLILKKEDELGDRSIMFTVQNED

SEQ ID NO: 145 - protein, 157 aa, synthetic construct
  source 1..157: note = human_IL18_E31Q_D35N_K53A
YFGKLESKLSVIRNLNDQVLFIDQGNRPLFQDMTNSDCRDNAPRTIFIISMYADSQPRGMAVTISVKCEKISTLSCENKIISFKEMNPPDNIKDTKSDIIFFQRSVPGHDNKMQFESSSYEGYFLACEKERDLFKLILKKEDELGDRSIMFTVQNED

SEQ ID NO: 146 - protein, 157 aa, synthetic construct
  source 1..157: note = human_IL18_E31Q_N41Q_K53A
YFGKLESKLSVIRNLNDQVLFIDQGNRPLFQDMTDSDCRDQAPRTIFIISMYADSQPRGMAVTISVKCEKISTLSCENKIISFKEMNPPDNIKDTKSDIIFFQRSVPGHDNKMQFESSSYEGYFLACEKERDLFKLILKKEDELGDRSIMFTVQNED

SEQ ID NO: 147 - protein, 157 aa, synthetic construct
  source 1..157: note = human_IL18_E31Q_D35N_N41Q_K53A
YFGKLESKLSVIRNLNDQVLFIDQGNRPLFQDMTNSDCRDQAPRTIFIISMYADSQPRGMAVTISVKCEKISTLSCENKIISFKEMNPPDNIKDTKSDIIFFQRSVPGHDNKMQFESSSYEGYFLACEKERDLFKLILKKEDELGDRSIMFTVQNED

SEQ ID NO: 148 - protein, 157 aa, synthetic construct
  source 1..157: note = human_IL18_E31Q_D35N
YFGKLESKLSVIRNLNDQVLFIDQGNRPLFQDMTNSDCRDNAPRTIFIISMYKDSQPRGMAVTISVKCEKISTLSCENKIISFKEMNPPDNIKDTKSDIIFFQRSVPGHDNKMQFESSSYEGYFLACEKERDLFKLILKKEDELGDRSIMFTVQNED

SEQ ID NO: 149 - protein, 157 aa, synthetic construct
  source 1..157: note = human_IL18_E31Q_N41Q
YFGKLESKLSVIRNLNDQVLFIDQGNRPLFQDMTDSDCRDQAPRTIFIISMYKDSQPRGMAVTISVKCEKISTLSCENKIISFKEMNPPDNIKDTKSDIIFFQRSVPGHDNKMQFESSSYEGYFLACEKERDLFKLILKKEDELGDRSIMFTVQNED

SEQ ID NO: 150 - protein, 157 aa, synthetic construct
  source 1..157: note = human_IL18_E31Q_D35N_N41Q
YFGKLESKLSVIRNLNDQVLFIDQGNRPLFQDMTNSDCRDQAPRTIFIISMYKDSQPRGMAVTISVKCEKISTLSCENKIISFKEMNPPDNIKDTKSDIIFFQRSVPGHDNKMQFESSSYEGYFLACEKERDLFKLILKKEDELGDRSIMFTVQNED

SEQ ID NO: 151 - protein, 157 aa, synthetic construct
  source 1..157: note = human_IL18_E31Q_D37N
YFGKLESKLSVIRNLNDQVLFIDQGNRPLFQDMTDSNSRDNAPRTIFIISMYKDSQPRGMAVTISVKCEKISTLSCENKIISFKEMNPPDNIKDTKSDIIFFQRSVPGHDNKMQFESSSYEGYFLACEKERDLFKLILKKEDELGDRSIMFTVQNED

SEQ ID NO: 152 - protein, 157 aa, synthetic construct
  source 1..157: note = human_IL18_E31Q_D37N_K53A
YFGKLESKLSVIRNLNDQVLFIDQGNRPLFQDMTDSNSRDNAPRTIFIISMYADSQPRGMAVTISVKCEKISTLSCENKIISFKEMNPPDNIKDTKSDIIFFQRSVPGHDNKMQFESSSYEGYFLACEKERDLFKLILKKEDELGDRSIMFTVQNED

SEQ ID NO: 153 - protein, 157 aa, synthetic construct
  source 1..157: note = human_IL18_4CS_M33C_S38C
YFGKLESKLSVIRNLNDQVLFIDQGNRPLFEDCTDSDCRDNAPRTIFIISMYKDSQPRGMAVTISVKSEKISTLSSENKIISFKEMNPPDNIKDTKSDIIFFQRSVPGHDNKMQFESSSYEGYFLASEKERDLFKLILKKEDELGDRSIMFTVQNED

SEQ ID NO: 154 - protein, 157 aa, synthetic construct
  source 1..157: note = human_IL18_4CS_S76C_L138C
YFGKLESKLSVIRNLNDQVLFIDQGNRPLFEDMTDSDSRDNAPRTIFIISMYKDSQPRGMAVTISVKSEKISTLSCENKIISFKEMNPPDNIKDTKSDIIFFQRSVPGHDNKMQFESSSYEGYFLASEKERDLFKLICKKEDELGDRSIMFTVQNED

SEQ ID NO: 155 - protein, 157 aa, synthetic construct
  source 1..157: note = human_IL18_4CS_N14C_S127C
YFGKLESKLSVIRCLNDQVLFIDQGNRPLFEDMTDSDSRDNAPRTIFIISMYKDSQPRGMAVTISVKSEKISTLSSENKIISFKEMNPPDNIKDTKSDIIFFQRSVPGHDNKMQFESSSYEGYFLACEKERDLFKLILKKEDELGDRSIMFTVQNED

SEQ ID NO: 156 - protein, 157 aa, synthetic construct
  source 1..157: note = human_IL18_4CS_S68I
YFGKLESKLSVIRNLNDQVLFIDQGNRPLFEDMTDSDSRDNAPRTIFIISMYKDSQPRGMAVTISVKIEKISTLSSENKIISFKEMNPPDNIKDTKSDIIFFQRSVPGHDNKMQFESSSYEGYFLASEKERDLFKLILKKEDELGDRSIMFTVQNED

SEQ ID NO: 157 - protein, 157 aa, synthetic construct
  source 1..157: note = human_IL18_4CS_S68F
YFGKLESKLSVIRNLNDQVLFIDQGNRPLFEDMTDSDSRDNAPRTIFIISMYKDSQPRGMAVTISVKFEKISTLSSENKIISFKEMNPPDNIKDTKSDIIFFQRSVPGHDNKMQFESSSYEGYFLASEKERDLFKLILKKEDELGDRSIMFTVQNED

SEQ ID NO: 158 - protein, 157 aa, synthetic construct
  source 1..157: note = human_IL18_4CS_S127W
YFGKLESKLSVIRNLNDQVLFIDQGNRPLFEDMTDSDSRDNAPRTIFIISMYKDSQPRGMAVTISVKSEKISTLSSENKIISFKEMNPPDNIKDTKSDIIFFQRSVPGHDNKMQFESSSYEGYFLAWEKERDLFKLILKKEDELGDRSIMFTVQNED

SEQ ID NO: 159 - protein, 157 aa, synthetic construct
  source 1..157: note = human_IL18_4CS_S127Y
YFGKLESKLSVIRNLNDQVLFIDQGNRPLFEDMTDSDSRDNAPRTIFIISMYKDSQPRGMAVTISVKSEKISTLSSENKIISFKEMNPPDNIKDTKSDIIFFQRSVPGHDNKMQFESSSYEGYFLAYEKERDLFKLILKKEDELGDRSIMFTVQNED

SEQ ID NO: 160 - protein, 157 aa, synthetic construct
  source 1..157: note = human_IL18_4CS_S127F
YFGKLESKLSVIRNLNDQVLFIDQGNRPLFEDMTDSDSRDNAPRTIFIISMYKDSQPRGMAVTISVKSEKISTLSSENKIISFKEMNPPDNIKDTKSDIIFFQRSVPGHDNKMQFESSSYEGYFLAFEKERDLFKLILKKEDELGDRSIMFTVQNED

SEQ ID NO: 161 - protein, 157 aa, synthetic construct
  source 1..157: note = human_IL18_4CS_S10C_I49C
YFGKLESKLCVIRNLNDQVLFIDQGNRPLFEDMTDSDSRDNAPRTIFICSMYKDSQPRGMAVTISVKSEKISTLSSENKIISFKEMNPPDNIKDTKSDIIFFQRSVPGHDNKMQFESSSYEGYFLASEKERDLFKLILKKEDELGDRSIMFTVQNED

SEQ ID NO: 162 - protein, 157 aa, synthetic construct
  source 1..157: note = human_IL18_4CS_L15C_R147C
YFGKLESKLSVIRNCNDQVLFIDQGNRPLFEDMTDSDSRDNAPRTIFIISMYKDSQPRGMAVTISVKSEKISTLSSENKIISFKEMNPPDNIKDTKSDIIFFQRSVPGHDNKMQFESSSYEGYFLASEKERDLFKLILKKEDELGDCSIMFTVQNED

SEQ ID NO: 163 - protein, 157 aa, synthetic construct
  source 1..157: note = human_IL18_4CS_P28C_L136C
YFGKLESKLSVIRNLNDQVLFIDQGNRCLFEDMTDSDSRDNAPRTIFIISMYKDSQPRGMAVTISVKSEKISTLSSENKIISFKEMNPPDNIKDTKSDIIFFQRSVPGHDNKMQFESSSYEGYFLASEKERDLFKCILKKEDELGDRSIMFTVQNED

SEQ ID NO: 164 - protein, 157 aa, synthetic construct
  source 1..157: note = human_IL18_4CS_S50C_P88C
YFGKLESKLSVIRNLNDQVLFIDQGNRPLFEDMTDSDSRDNAPRTIFIICMYKDSQPRGMAVTISVKSEKISTLSSENKIISFKEMNCPDNIKDTKSDIIFFQRSVPGHDNKMQFESSSYEGYFLASEKERDLFKLILKKEDELGDRSIMFTVQNED

SEQ ID NO: 165 - protein, 157 aa, synthetic construct
  source 1..157: note = human_IL18_4CS_T63C_P88C
YFGKLESKLSVIRNLNDQVLFIDQGNRPLFEDMTDSDSRDNAPRTIFIISMYKDSQPRGMAVCISVKSEKISTLSSENKIISFKEMNCPDNIKDTKSDIIFFQRSVPGHDNKMQFESSSYEGYFLASEKERDLFKLILKKEDELGDRSIMFTVQNED

SEQ ID NO: 166 - protein, 157 aa, synthetic construct
  source 1..157: note = human_IL18_4CS_V62C_Q103C
YFGKLESKLSVIRNLNDQVLFIDQGNRPLFEDMTDSDSRDNAPRTIFIISMYKDSQPRGMACTISVKSEKISTLSSENKIISFKEMNPPDNIKDTKSDIIFFCRSVPGHDNKMQFESSSYEGYFLASEKERDLFKLILKKEDELGDRSIMFTVQNED

SEQ ID NO: 167 - protein, 157 aa, synthetic construct
  source 1..157: note = human_IL18_4CS_S10C_N155C
YFGKLESKLCVIRNLNDQVLFIDQGNRPLFEDMTDSDSRDNAPRTIFIISMYKDSQPRGMAVTISVKSEKISTLSSENKIISFKEMNPPDNIKDTKSDIIFFQRSVPGHDNKMQFESSSYEGYFLASEKERDLFKLILKKEDELGDRSIMFTVQCED

SEQ ID NO: 168 - protein, 157 aa, synthetic construct
  source 1..157: note = human_IL18_4CS_S65C_P88C
YFGKLESKLSVIRNLNDQVLFIDQGNRPLFEDMTDSDSRDNAPRTIFIISMYKDSQPRGMAVTICVKSEKISTLSSENKIISFKEMNCPDNIKDTKSDIIFFQRSVPGHDNKMQFESSSYEGYFLASEKERDLFKLILKKEDELGDRSIMFTVQNED

SEQ ID NO: 169 - protein, 157 aa, synthetic construct
  source 1..157: note = human_IL18_4CS_S7C_S50C
YFGKLECKLSVIRNLNDQVLFIDQGNRPLFEDMTDSDSRDNAPRTIFIICMYKDSQPRGMAVTISVKSEKISTLSSENKIISFKEMNPPDNIKDTKSDIIFFQRSVPGHDNKMQFESSSYEGYFLASEKERDLFKLILKKEDELGDRSIMFTVQNED

SEQ ID NO: 170 - protein, 157 aa, synthetic construct
  source 1..157: note = human_IL18_4CS_D54C_A61C
YFGKLESKLSVIRNLNDQVLFIDQGNRPLFEDMTDSDSRDNAPRTIFIISMYKCSQPRGMCVTISVKSEKISTLSSENKIISFKEMNPPDNIKDTKSDIIFFQRSVPGHDNKMQFESSSYEGYFLASEKERDLFKLILKKEDELGDRSIMFTVQNED

SEQ ID NO: 171 - protein, 157 aa, synthetic construct
  source 1..157: note = human_IL18_4CS_A126C_K139C
YFGKLESKLSVIRNLNDQVLFIDQGNRPLFEDMTDSDSRDNAPRTIFIISMYKDSQPRGMAVTISVKSEKISTLSSENKIISFKEMNPPDNIKDTKSDIIFFQRSVPGHDNKMQFESSSYEGYFLCSEKERDLFKLILCKEDELGDRSIMFTVQNED

SEQ ID NO: 172 - protein, 157 aa, synthetic construct
  source 1..157: note = human_IL18_4CS_N14W_E31Q
YFGKLESKLSVIRWLNDQVLFIDQGNRPLFEDMTDSDSRDNAPRTIFIISMYKDSQPRGMAVTISVKSEKISTLSSENKIISFKEMNPPDNIKDTKSDIIFFQRSVPGHDNKMQFESSSYEGYFLASEKERDLFKLILKKEDELGDRSIMFTVQNED

SEQ ID NO: 173 - protein, 157 aa, synthetic construct
  source 1..157: note = human_IL18_4CS_D146Y
YFGKLESKLSVIRNLNDQVLFIDQGNRPLFEDMTDSDSRDNAPRTIFIISMYKDSQPRGMAVTISVKSEKISTLSSENKIISFKEMNPPDNIKDTKSDIIFFQRSVPGHDNKMQFESSSYEGYFLASEKERDLFKLILKKEDELGYRSIMFTVQNED

SEQ ID NO: 174 - protein, 157 aa, synthetic construct
  source 1..157: note = human_IL18_4CS_D146L
YFGKLESKLSVIRNLNDQVLFIDQGNRPLFEDMTDSDSRDNAPRTIFIISMYKDSQPRGMAVTISVKSEKISTLSSENKIISFKEMNPPDNIKDTKSDIIFFQRSVPGHDNKMQFESSSYEGYFLASEKERDLFKLILKKEDELGLRSIMFTVQNED

SEQ ID NO: 175 - protein, 157 aa, synthetic construct
  source 1..157: note = human_IL18_4CS_D146F
YFGKLESKLSVIRNLNDQVLFIDQGNRPLFEDMTDSDSRDNAPRTIFIISMYKDSQPRGMAVTISVKSEKISTLSSENKIISFKEMNPPDNIKDTKSDIIFFQRSVPGHDNKMQFESSSYEGYFLASEKERDLFKLILKKEDELGFRSIMFTVQNED

SEQ ID NO: 176 - protein, 157 aa, synthetic construct
  source 1..157: note = human_IL18_4CS_Q103L
YFGKLESKLSVIRNLNDQVLFIDQGNRPLFEDMTDSDSRDNAPRTIFIISMYKDSQPRGMAVTISVKSEKISTLSSENKIISFKEMNPPDNIKDTKSDIIFFLRSVPGHDNKMQFESSSYEGYFLASEKERDLFKLILKKEDELGDRSIMFTVQNED

SEQ ID NO: 177 - protein, 157 aa, synthetic construct
  source 1..157: note = human_IL18_4CS_Q103I
YFGKLESKLSVIRNLNDQVLFIDQGNRPLFEDMTDSDSRDNAPRTIFIISMYKDSQPRGMAVTISVKSEKISTLSSENKIISFKEMNPPDNIKDTKSDIIFFIRSVPGHDNKMQFESSSYEGYFLASEKERDLFKLILKKEDELGDRSIMFTVQNED

SEQ ID NO: 178 - protein, 157 aa, synthetic construct
  source 1..157: note = human_IL18_4CS_M150F
YFGKLESKLSVIRNLNDQVLFIDQGNRPLFEDMTDSDSRDNAPRTIFIISMYKDSQPRGMAVTISVKSEKISTLSSENKIISFKEMNPPDNIKDTKSDIIFFQRSVPGHDNKMQFESSSYEGYFLASEKERDLFKLILKKEDELGDRSIFFTVQNED

SEQ ID NO: 179 - protein, 157 aa, synthetic construct
  source 1..157: note = human_IL18_4CS_Q18L_E31Q
YFGKLESKLSVIRNLNDLVLFIDQGNRPLFEDMTDSDSRDNAPRTIFIISMYKDSQPRGMAVTISVKSEKISTLSSENKIISFKEMNPPDNIKDTKSDIIFFQRSVPGHDNKMQFESSSYEGYFLASEKERDLFKLILKKEDELGDRSIMFTVQNED

SEQ ID NO: 180 - protein, 157 aa, synthetic construct
  source 1..157: note = human_IL18_4CS_S68Y
YFGKLESKLSVIRNLNDQVLFIDQGNRPLFEDMTDSDSRDNAPRTIFIISMYKDSQPRGMAVTISVKYEKISTLSSENKIISFKEMNPPDNIKDTKSDIIFFQRSVPGHDNKMQFESSSYEGYFLASEKERDLFKLILKKEDELGDRSIMFTVQNED

SEQ ID NO: 181 - protein, 157 aa, synthetic construct
  source 1..157: note = human_IL18_4CS_S38Q
YFGKLESKLSVIRNLNDQVLFIDQGNRPLFEDMTDSDQRDNAPRTIFIISMYKDSQPRGMAVTISVKSEKISTLSSENKIISFKEMNPPDNIKDTKSDIIFFQRSVPGHDNKMQFESSSYEGYFLASEKERDLFKLILKKEDELGDRSIMFTVQNED

SEQ ID NO: 182 - protein, 157 aa, synthetic construct
  source 1..157: note = human_IL18_4CS_S38R
YFGKLESKLSVIRNLNDQVLFIDQGNRPLFEDMTDSDRRDNAPRTIFIISMYKDSQPRGMAVTISVKSEKISTLSSENKIISFKEMNPPDNIKDTKSDIIFFQRSVPGHDNKMQFESSSYEGYFLASEKERDLFKLILKKEDELGDRSIMFTVQNED

SEQ ID NO: 183 - protein, 157 aa, synthetic construct
  source 1..157: note = human_IL18_4CS_S68D
YFGKLESKLSVIRNLNDQVLFIDQGNRPLFEDMTDSDSRDNAPRTIFIISMYKDSQPRGMAVTISVKDEKISTLSSENKIISFKEMNPPDNIKDTKSDIIFFQRSVPGHDNKMQFESSSYEGYFLASEKERDLFKLILKKEDELGDRSIMFTVQNED

SEQ ID NO: 184 - protein, 157 aa, synthetic construct
  source 1..157: note = human_IL18_4CS_S7P
YFGKLEPKLSVIRNLNDQVLFIDQGNRPLFEDMTDSDSRDNAPRTIFIISMYKDSQPRGMAVTISVKSEKISTLSSENKIISFKEMNPPDNIKDTKSDIIFFQRSVPGHDNKMQFESSSYEGYFLASEKERDLFKLILKKEDELGDRSIMFTVQNED

SEQ ID NO: 185 - protein, 157 aa, synthetic construct
  source 1..157: note = human_IL18_4CS_V11I
YFGKLESKLSIIRNLNDQVLFIDQGNRPLFEDMTDSDSRDNAPRTIFIISMYKDSQPRGMAVTISVKSEKISTLSSENKIISFKEMNPPDNIKDTKSDIIFFQRSVPGHDNKMQFESSSYEGYFLASEKERDLFKLILKKEDELGDRSIMFTVQNED

SEQ ID NO: 186 - protein, 157 aa, synthetic construct
  source 1..157: note = human_IL18_4CS_D23N
YFGKLESKLSVIRNLNDQVLFINQGNRPLFEDMTDSDSRDNAPRTIFIISMYKDSQPRGMAVTISVKSEKISTLSSENKIISFKEMNPPDNIKDTKSDIIFFQRSVPGHDNKMQFESSSYEGYFLASEKERDLFKLILKKEDELGDRSIMFTVQNED

SEQ ID NO: 187 - protein, 157 aa, synthetic construct
  source 1..157: note = human_IL18_4CS_D23S
YFGKLESKLSVIRNLNDQVLFISQGNRPLFEDMTDSDSRDNAPRTIFIISMYKDSQPRGMAVTISVKSEKISTLSSENKIISFKEMNPPDNIKDTKSDIIFFQRSVPGHDNKMQFESSSYEGYFLASEKERDLFKLILKKEDELGDRSIMFTVQNED

SEQ ID NO: 188 - protein, 157 aa, synthetic construct
  source 1..157: note = human_IL18_4CS_R27Q
YFGKLESKLSVIRNLNDQVLFIDQGNQPLFEDMTDSDSRDNAPRTIFIISMYKDSQPRGMAVTISVKSEKISTLSSENKIISFKEMNPPDNIKDTKSDIIFFQRSVPGHDNKMQFESSSYEGYFLASEKERDLFKLILKKEDELGDRSIMFTVQNED

SEQ ID NO: 189 - protein, 157 aa, synthetic construct
  source 1..157: note = human_IL18_4CS_L29V
YFGKLESKLSVIRNLNDQVLFIDQGNRPVFEDMTDSDSRDNAPRTIFIISMYKDSQPRGMAVTISVKSEKISTLSSENKIISFKEMNPPDNIKDTKSDIIFFQRSVPGHDNKMQFESSSYEGYFLASEKERDLFKLILKKEDELGDRSIMFTVQNED

SEQ ID NO: 190 - protein, 157 aa, synthetic construct
  source 1..157: note = human_IL18_4CS_T34P
YFGKLESKLSVIRNLNDQVLFIDQGNRPLFEDMPDSDSRDNAPRTIFIISMYKDSQPRGMAVTISVKSEKISTLSSENKIISFKEMNPPDNIKDTKSDIIFFQRSVPGHDNKMQFESSSYEGYFLASEKERDLFKLILKKEDELGDRSIMFTVQNED

SEQ ID NO: 191 - protein, 157 aa, synthetic construct
  source 1..157: note = human_IL18_4CS_R39T
YFGKLESKLSVIRNLNDQVLFIDQGNRPLFEDMTDSDSTDNAPRTIFIISMYKDSQPRGMAVTISVKSEKISTLSSENKIISFKEMNPPDNIKDTKSDIIFFQRSVPGHDNKMQFESSSYEGYFLASEKERDLFKLILKKEDELGDRSIMFTVQNED

SEQ ID NO: 192 - protein, 157 aa, synthetic construct
  source 1..157: note = human_IL18_4CS_R39S
YFGKLESKLSVIRNLNDQVLFIDQGNRPLFEDMTDSDSSDNAPRTIFIISMYKDSQPRGMAVTISVKSEKISTLSSENKIISFKEMNPPDNIKDTKSDIIFFQRSVPGHDNKMQFESSSYEGYFLASEKERDLFKLILKKEDELGDRSIMFTVQNED

SEQ ID NO: 193 - protein, 157 aa, synthetic construct
  source 1..157: note = human_IL18_4CS_R44Q
YFGKLESKLSVIRNLNDQVLFIDQGNRPLFEDMTDSDSRDNAPQTIFIISMYKDSQPRGMAVTISVKSEKISTLSSENKIISFKEMNPPDNIKDTKSDIIFFQRSVPGHDNKMQFESSSYEGYFLASEKERDLFKLILKKEDELGDRSIMFTVQNED

SEQ ID NO: 194 - protein, 157 aa, synthetic construct
  source 1..157: note = human_IL18_4CS_I46V
YFGKLESKLSVIRNLNDQVLFIDQGNRPLFEDMTDSDSRDNAPRTVFIISMYKDSQPRGMAVTISVKSEKISTLSSENKIISFKEMNPPDNIKDTKSDIIFFQRSVPGHDNKMQFESSSYEGYFLASEKERDLFKLILKKEDELGDRSIMFTVQNED

SEQ ID NO: 195 - protein, 157 aa, synthetic construct
  source 1..157: note = human_IL18_4CS_S50Y
YFGKLESKLSVIRNLNDQVLFIDQGNRPLFEDMTDSDSRDNAPRTIFIIYMYKDSQPRGMAVTISVKSEKISTLSSENKIISFKEMNPPDNIKDTKSDIIFFQRSVPGHDNKMQFESSSYEGYFLASEKERDLFKLILKKEDELGDRSIMFTVQNED

SEQ ID NO: 196 - protein, 157 aa, synthetic construct
  source 1..157: note = human_IL18_4CS_Q56L
YFGKLESKLSVIRNLNDQVLFIDQGNRPLFEDMTDSDSRDNAPRTIFIISMYKDSLPRGMAVTISVKSEKISTLSSENKIISFKEMNPPDNIKDTKSDIIFFQRSVPGHDNKMQFESSSYEGYFLASEKERDLFKLILKKEDELGDRSIMFTVQNED

SEQ ID NO: 197 - protein, 157 aa, synthetic construct
  source 1..157: note = human_IL18_4CS_Q56L_P57T
YFGKLESKLSVIRNLNDQVLFIDQGNRPLFEDMTDSDSRDNAPRTIFIISMYKDSLTRGMAVTISVKSEKISTLSSENKIISFKEMNPPDNIKDTKSDIIFFQRSVPGHDNKMQFESSSYEGYFLASEKERDLFKLILKKEDELGDRSIMFTVQNED

SEQ ID NO: 198 - protein, 157 aa, synthetic construct
  source 1..157: note = human_IL18_4CS_P57T
YFGKLESKLSVIRNLNDQVLFIDQGNRPLFEDMTDSDSRDNAPRTIFIISMYKDSQTRGMAVTISVKSEKISTLSSENKIISFKEMNPPDNIKDTKSDIIFFQRSVPGHDNKMQFESSSYEGYFLASEKERDLFKLILKKEDELGDRSIMFTVQNED

SEQ ID NO: 199 - protein, 157 aa, synthetic construct
  source 1..157: note = human_IL18_4CS_P57V
YFGKLESKLSVIRNLNDQVLFIDQGNRPLFEDMTDSDSRDNAPRTIFIISMYKDSQVRGMAVTISVKSEKISTLSSENKIISFKEMNPPDNIKDTKSDIIFFQRSVPGHDNKMQFESSSYEGYFLASEKERDLFKLILKKEDELGDRSIMFTVQNED

SEQ ID NO: 200 - skipped

SEQ ID NO: 201 - protein, 157 aa, synthetic construct
  source 1..157: note = human_IL18_4CS_M60L
YFGKLESKLSVIRNLNDQVLFIDQGNRPLFEDMTDSDSRDNAPRTIFIISMYKDSQPRGLAVTISVKSEKISTLSSENKIISFKEMNPPDNIKDTKSDIIFFQRSVPGHDNKMQFESSSYEGYFLASEKERDLFKLILKKEDELGDRSIMFTVQNED

SEQ ID NO: 202 - protein, 157 aa, synthetic construct
  source 1..157: note = human_IL18_4CS_K67Q
YFGKLESKLSVIRNLNDQVLFIDQGNRPLFEDMTDSDSRDNAPRTIFIISMYKDSQPRGMAVTISVQSEKISTLSSENKIISFKEMNPPDNIKDTKSDIIFFQRSVPGHDNKMQFESSSYEGYFLASEKERDLFKLILKKEDELGDRSIMFTVQNED

SEQ ID NO: 203 - protein, 157 aa, synthetic construct
  source 1..157: note = human_IL18_4CS_E69K
YFGKLESKLSVIRNLNDQVLFIDQGNRPLFEDMTDSDSRDNAPRTIFIISMYKDSQPRGMAVTISVKSKKISTLSSENKIISFKEMNPPDNIKDTKSDIIFFQRSVPGHDNKMQFESSSYEGYFLASEKERDLFKLILKKEDELGDRSIMFTVQNED

SEQ ID NO: 204 - protein, 157 aa, synthetic construct
  source 1..157: note = human_IL18_4CS_I71M
YFGKLESKLSVIRNLNDQVLFIDQGNRPLFEDMTDSDSRDNAPRTIFIISMYKDSQPRGMAVTISVKSEKMSTLSSENKIISFKEMNPPDNIKDTKSDIIFFQRSVPGHDNKMQFESSSYEGYFLASEKERDLFKLILKKEDELGDRSIMFTVQNED

SEQ ID NO: 205 - protein, 157 aa, synthetic construct
  source 1..157: note = human_IL18_4CS_E77K
YFGKLESKLSVIRNLNDQVLFIDQGNRPLFEDMTDSDSRDNAPRTIFIISMYKDSQPRGMAVTISVKSEKISTLSSKNKIISFKEMNPPDNIKDTKSDIIFFQRSVPGHDNKMQFESSSYEGYFLASEKERDLFKLILKKEDELGDRSIMFTVQNED

SEQ ID NO: 206 - protein, 157 aa, synthetic construct
  source 1..157: note = human_IL18_4CS_I80T
YFGKLESKLSVIRNLNDQVLFIDQGNRPLFEDMTDSDSRDNAPRTIFIISMYKDSQPRGMAVTISVKSEKISTLSSENKTISFKEMNPPDNIKDTKSDIIFFQRSVPGHDNKMQFESSSYEGYFLASEKERDLFKLILKKEDELGDRSIMFTVQNED

SEQ ID NO: 207 - protein, 157 aa, synthetic construct
  source 1..157: note = human_IL18_4CS_I81V
YFGKLESKLSVIRNLNDQVLFIDQGNRPLFEDMTDSDSRDNAPRTIFIISMYKDSQPRGMAVTISVKSEKISTLSSENKIVSFKEMNPPDNIKDTKSDIIFFQRSVPGHDNKMQFESSSYEGYFLASEKERDLFKLILKKEDELGDRSIMFTVQNED

SEQ ID NO: 208 - protein, 157 aa, synthetic construct
  source 1..157: note = human_IL18_4CS_I81L
YFGKLESKLSVIRNLNDQVLFIDQGNRPLFEDMTDSDSRDNAPRTIFIISMYKDSQPRGMAVTISVKSEKISTLSSENKILSFKEMNPPDNIKDTKSDIIFFQRSVPGHDNKMQFESSSYEGYFLASEKERDLFKLILKKEDELGDRSIMFTVQNED

SEQ ID NO: 209 - protein, 157 aa, synthetic construct
  source 1..157: note = human_IL18_4CS_N87S
YFGKLESKLSVIRNLNDQVLFIDQGNRPLFEDMTDSDSRDNAPRTIFIISMYKDSQPRGMAVTISVKSEKISTLSSENKIISFKEMSPPDNIKDTKSDIIFFQRSVPGHDNKMQFESSSYEGYFLASEKERDLFKLILKKEDELGDRSIMFTVQNED

SEQ ID NO: 210 - protein, 157 aa, synthetic construct
  source 1..157: note = human_IL18_4CS_D90E
YFGKLESKLSVIRNLNDQVLFIDQGNRPLFEDMTDSDSRDNAPRTIFIISMYKDSQPRGMAVTISVKSEKISTLSSENKIISFKEMNPPENIKDTKSDIIFFQRSVPGHDNKMQFESSSYEGYFLASEKERDLFKLILKKEDELGDRSIMFTVQNED

SEQ ID NO: 211 - protein, 157 aa, synthetic construct
  source 1..157: note = human_IL18_4CS_K93D_T95E
YFGKLESKLSVIRNLNDQVLFIDQGNRPLFEDMTDSDSRDNAPRTIFIISMYKDSQPRGMAVTISVKSEKISTLSSENKIISFKEMNPPDNIDDEKSDIIFFQRSVPGHDNKMQFESSSYEGYFLASEKERDLFKLILKKEDELGDRSIMFTVQNED

SEQ ID NO: 212 - protein, 157 aa, synthetic construct
  source 1..157: note = human_IL18_4CS_K93N_T95E
YFGKLESKLSVIRNLNDQVLFIDQGNRPLFEDMTDSDSRDNAPRTIFIISMYKDSQPRGMAVTISVKSEKISTLSSENKIISFKEMNPPDNINDEKSDIIFFQRSVPGHDNKMQFESSSYEGYFLASEKERDLFKLILKKEDELGDRSIMFTVQNED

SEQ ID NO: 213 - protein, 157 aa, synthetic construct
  source 1..157: note = human_IL18_4CS_T95E
YFGKLESKLSVIRNLNDQVLFIDQGNRPLFEDMTDSDSRDNAPRTIFIISMYKDSQPRGMAVTISVKSEKISTLSSENKIISFKEMNPPDNIKDEKSDIIFFQRSVPGHDNKMQFESSSYEGYFLASEKERDLFKLILKKEDELGDRSIMFTVQNED

SEQ ID NO: 214 - protein, 157 aa, synthetic construct
  source 1..157: note = human_IL18_4CS_K96G
YFGKLESKLSVIRNLNDQVLFIDQGNRPLFEDMTDSDSRDNAPRTIFIISMYKDSQPRGMAVTISVKSEKISTLSSENKIISFKEMNPPDNIKDTGSDIIFFQRSVPGHDNKMQFESSSYEGYFLASEKERDLFKLILKKEDELGDRSIMFTVQNED

SEQ ID NO: 215 - protein, 157 aa, synthetic construct
  source 1..157: note = human_IL18_4CS_S97N
YFGKLESKLSVIRNLNDQVLFIDQGNRPLFEDMTDSDSRDNAPRTIFIISMYKDSQPRGMAVTISVKSEKISTLSSENKIISFKEMNPPDNIKDTKNDIIFFQRSVPGHDNKMQFESSSYEGYFLASEKERDLFKLILKKEDELGDRSIMFTVQNED

SEQ ID NO: 216 - protein, 157 aa, synthetic construct
  source 1..157: note = human_IL18_4CS_N111D
YFGKLESKLSVIRNLNDQVLFIDQGNRPLFEDMTDSDSRDNAPRTIFIISMYKDSQPRGMAVTISVKSEKISTLSSENKIISFKEMNPPDNIKDTKSDIIFFQRSVPGHDDKMQFESSSYEGYFLASEKERDLFKLILKKEDELGDRSIMFTVQNED

SEQ ID NO: 217 - protein, 157 aa, synthetic construct
  source 1..157: note = human_IL18_4CS_M113I
YFGKLESKLSVIRNLNDQVLFIDQGNRPLFEDMTDSDSRDNAPRTIFIISMYKDSQPRGMAVTISVKSEKISTLSSENKIISFKEMNPPDNIKDTKSDIIFFQRSVPGHDNKIQFESSSYEGYFLASEKERDLFKLILKKEDELGDRSIMFTVQNED

SEQ ID NO: 218 - protein, 157 aa, synthetic construct
  source 1..157: note = human_IL18_4CS_S119L
YFGKLESKLSVIRNLNDQVLFIDQGNRPLFEDMTDSDSRDNAPRTIFIISMYKDSQPRGMAVTISVKSEKISTLSSENKIISFKEMNPPDNIKDTKSDIIFFQRSVPGHDNKMQFESSLYEGYFLASEKERDLFKLILKKEDELGDRSIMFTVQNED

SEQ ID NO: 219 - protein, 157 aa, synthetic construct
  source 1..157: note = human_IL18_4CS_L144N
YFGKLESKLSVIRNLNDQVLFIDQGNRPLFEDMTDSDSRDNAPRTIFIISMYKDSQPRGMAVTISVKSEKISTLSSENKIISFKEMNPPDNIKDTKSDIIFFQRSVPGHDNKMQFESSSYEGYFLASEKERDLFKLILKKEDENGDRSIMFTVQNED

SEQ ID NO: 220 - protein, 157 aa, synthetic construct
  source 1..157: note = human_IL18_4CS_R147K
YFGKLESKLSVIRNLNDQVLFIDQGNRPLFEDMTDSDSRDNAPRTIFIISMYKDSQPRGMAVTISVKSEKISTLSSENKIISFKEMNPPDNIKDTKSDIIFFQRSVPGHDNKMQFESSSYEGYFLASEKERDLFKLILKKEDELGDKSIMFTVQNED

SEQ ID NO: 221 - protein, 157 aa, synthetic construct
  source 1..157: note = human_IL18_4CS_I149V
YFGKLESKLSVIRNLNDQVLFIDQGNRPLFEDMTDSDSRDNAPRTIFIISMYKDSQPRGMAVTISVKSEKISTLSSENKIISFKEMNPPDNIKDTKSDIIFFQRSVPGHDNKMQFESSSYEGYFLASEKERDLFKLILKKEDELGDRSVMFTVQNED

SEQ ID NO: 222 - protein, 157 aa, synthetic construct
  source 1..157: note = human_IL18_4CS_M150T
YFGKLESKLSVIRNLNDQVLFIDQGNRPLFEDMTDSDSRDNAPRTIFIISMYKDSQPRGMAVTISVKSEKISTLSSENKIISFKEMNPPDNIKDTKSDIIFFQRSVPGHDNKMQFESSSYEGYFLASEKERDLFKLILKKEDELGDRSITFTVQNED

SEQ ID NO: 223 - protein, 157 aa, synthetic construct
  source 1..157: note = human_IL18_4CS_E156Q_D157N
YFGKLESKLSVIRNLNDQVLFIDQGNRPLFEDMTDSDSRDNAPRTIFIISMYKDSQPRGMAVTISVKSEKISTLSSENKIISFKEMNPPDNIKDTKSDIIFFQRSVPGHDNKMQFESSSYEGYFLASEKERDLFKLILKKEDELGDRSIMFTVQNQN

SEQ ID NO: 224 - protein, 157 aa, synthetic construct
  source 1..157: note = human_IL18_4CS_S38E
YFGKLESKLSVIRNLNDQVLFIDQGNRPLFEDMTDSDERDNAPRTIFIISMYKDSQPRGMAVTISVKSEKISTLSSENKIISFKEMNPPDNIKDTKSDIIFFQRSVPGHDNKMQFESSSYEGYFLASEKERDLFKLILKKEDELGDRSIMFTVQNED

SEQ ID NO: 225 - protein, 157 aa, synthetic construct
  source 1..157: note = human_IL18_4CS_S38L
YFGKLESKLSVIRNLNDQVLFIDQGNRPLFEDMTDSDLRDNAPRTIFIISMYKDSQPRGMAVTISVKSEKISTLSSENKIISFKEMNPPDNIKDTKSDIIFFQRSVPGHDNKMQFESSSYEGYFLASEKERDLFKLILKKEDELGDRSIMFTVQNED

SEQ ID NO: 226 - protein, 157 aa, synthetic construct
  source 1..157: note = human_IL18_4CS_S38I
YFGKLESKLSVIRNLNDQVLFIDQGNRPLFEDMTDSDIRDNAPRTIFIISMYKDSQPRGMAVTISVKSEKISTLSSENKIISFKEMNPPDNIKDTKSDIIFFQRSVPGHDNKMQFESSSYEGYFLASEKERDLFKLILKKEDELGDRSIMFTVQNED

SEQ ID NO: 227 - protein, 157 aa, synthetic construct
  source 1..157: note = human_IL18_4CS_S38V
YFGKLESKLSVIRNLNDQVLFIDQGNRPLFEDMTDSDVRDNAPRTIFIISMYKDSQPRGMAVTISVKSEKISTLSSENKIISFKEMNPPDNIKDTKSDIIFFQRSVPGHDNKMQFESSSYEGYFLASEKERDLFKLILKKEDELGDRSIMFTVQNED

SEQ ID NO: 228 - protein, 157 aa, synthetic construct
  source 1..157: note = human_IL18_4CS_S68N
YFGKLESKLSVIRNLNDQVLFIDQGNRPLFEDMTDSDSRDNAPRTIFIISMYKDSQPRGMAVTISVKNEKISTLSSENKIISFKEMNPPDNIKDTKSDIIFFQRSVPGHDNKMQFESSSYEGYFLASEKERDLFKLILKKEDELGDRSIMFTVQNED

SEQ ID NO: 229 - protein, 157 aa, synthetic construct
  source 1..157: note = human_IL18_4CS_S68E
YFGKLESKLSVIRNLNDQVLFIDQGNRPLFEDMTDSDSRDNAPRTIFIISMYKDSQPRGMAVTISVKEEKISTLSSENKIISFKEMNPPDNIKDTKSDIIFFQRSVPGHDNKMQFESSSYEGYFLASEKERDLFKLILKKEDELGDRSIMFTVQNED

SEQ ID NO: 230 - protein, 157 aa, synthetic construct
  source 1..157: note = human_IL18_4CS_S68Q
YFGKLESKLSVIRNLNDQVLFIDQGNRPLFEDMTDSDSRDNAPRTIFIISMYKDSQPRGMAVTISVKQEKISTLSSENKIISFKEMNPPDNIKDTKSDIIFFQRSVPGHDNKMQFESSSYEGYFLASEKERDLFKLILKKEDELGDRSIMFTVQNED

SEQ ID NO: 231 - protein, 157 aa, synthetic construct
  source 1..157: note = human_IL18_4CS_S127D
YFGKLESKLSVIRNLNDQVLFIDQGNRPLFEDMTDSDSRDNAPRTIFIISMYKDSQPRGMAVTISVKSEKISTLSSENKIISFKEMNPPDNIKDTKSDIIFFQRSVPGHDNKMQFESSSYEGYFLADEKERDLFKLILKKEDELGDRSIMFTVQNED

SEQ ID NO: 232 - protein, 157 aa, synthetic construct
  source 1..157: note = human_IL18_4CS_S127E
YFGKLESKLSVIRNLNDQVLFIDQGNRPLFEDMTDSDSRDNAPRTIFIISMYKDSQPRGMAVTISVKSEKISTLSSENKIISFKEMNPPDNIKDTKSDIIFFQRSVPGHDNKMQFESSSYEGYFLAEEKERDLFKLILKKEDELGDRSIMFTVQNED

SEQ ID NO: 233 - protein, 157 aa, synthetic construct
  source 1..157: note = human_IL18_4CS_D23N_R27Q
YFGKLESKLSVIRNLNDQVLFINQGNQPLFEDMTDSDSRDNAPRTIFIISMYKDSQPRGMAVTISVKSEKISTLSSENKIISFKEMNPPDNIKDTKSDIIFFQRSVPGHDNKMQFESSSYEGYFLASEKERDLFKLILKKEDELGDRSIMFTVQNED

SEQ ID NO: 234 - protein, 157 aa, synthetic construct
  source 1..157: note = human_IL18_4CS_Q56L_T95E
YFGKLESKLSVIRNLNDQVLFIDQGNRPLFEDMTDSDSRDNAPRTIFIISMYKDSLPRGMAVTISVKSEKISTLSSENKIISFKEMNPPDNIKDEKSDIIFFQRSVPGHDNKMQFESSSYEGYFLASEKERDLFKLILKKEDELGDRSIMFTVQNED

SEQ ID NO: 235 - protein, 157 aa, synthetic construct
  source 1..157: note = human_IL18_4CS_K96Q_S119L
YFGKLESKLSVIRNLNDQVLFIDQGNRPLFEDMTDSDSRDNAPRTIFIISMYKDSQPRGMAVTISVKSEKISTLSSENKIISFKEMNPPDNIKDTQSDIIFFQRSVPGHDNKMQFESSLYEGYFLASEKERDLFKLILKKEDELGDRSIMFTVQNED

SEQ ID NO: 236 - protein, 157 aa, synthetic construct
  source 1..157: note = human_IL18_4CS_E141K_I149V
YFGKLESKLSVIRNLNDQVLFIDQGNRPLFEDMTDSDSRDNAPRTIFIISMYKDSQPRGMAVTISVKSEKISTLSSENKIISFKEMNPPDNIKDTKSDIIFFQRSVPGHDNKMQFESSSYEGYFLASEKERDLFKLILKKKDELGDRSVMFTVQNED

SEQ ID NO: 237 - protein, 157 aa, synthetic construct
  source 1..157: note = human_IL18_4CS_E141Q_I149V
YFGKLESKLSVIRNLNDQVLFIDQGNRPLFEDMTDSDSRDNAPRTIFIISMYKDSQPRGMAVTISVKSEKISTLSSENKIISFKEMNPPDNIKDTKSDIIFFQRSVPGHDNKMQFESSSYEGYFLASEKERDLFKLILKKQDELGDRSVMFTVQNED

SEQ ID NO: 238 - protein, 157 aa, synthetic construct
  source 1..157: note = human_IL18_4CS_S7P_S50Y
YFGKLEPKLSVIRNLNDQVLFIDQGNRPLFEDMTDSDSRDNAPRTIFIIYMYKDSQPRGMAVTISVKSEKISTLSSENKIISFKEMNPPDNIKDTKSDIIFFQRSVPGHDNKMQFESSSYEGYFLASEKERDLFKLILKKEDELGDRSIMFTVQNED

SEQ ID NO: 239 - protein, 393 aa, synthetic construct
  source 1..393: note = XENP30792 Chain 1 - human_IL18_(GGGGS)1_Fc(216)_IgG1_pI(-)_Isosteric_A_C220S/PV A_/S267K/L368D/K370S
YFGKLESKLSVIRNLNDQVLFIDQGNRPLFEDMTDSDCRDNAPRTIFIISMYKDSQPRGMAVTISVKCEKISTLSCENKIISFKEMNPPDNIKDTKSDIIFFQRSVPGHDNKMQFESSSYEGYFLACEKERDLFKLILKKEDELGDRSIMFTVQNEDGGGGSEPKSSDKTHTCPPCPAPPVAGPSVFLFPPKPKDTLMISRTPEVTCVVVDVKHEDPEVKFNWYVDGVEVHNAKTKPREEEYNSTYRVVSVLTVLHQDWLNGKEYKCKVSNKALPAPIEKTISKAKGQPREPQVYTLPPSREEMTKNQVSLTCDVSGFYPSDIAVEWESDGQPENNYKTTPPVLDSDGSFFLYSKLTVDKSRWEQGDVFSCSVMHEALHNHYTQKSLSLSPGK

SEQ ID NO: 240 - protein, 231 aa, synthetic construct
  source 1..231: note = XENP30792 Chain 2 - empty_Fc(216)_IgG1_C220S/PVA_/S267K/S364K/E357Q
EPKSSDKTHTCPPCPAPPVAGPSVFLFPPKPKDTLMISRTPEVTCVVVDVKHEDPEVKFNWYVDGVEVHNAKTKPREEQYNSTYRVVSVLTVLHQDWLNGKEYKCKVSNKALPAPIEKTISKAKGQPREPQVYTLPPSREQMTKNQVKLTCLVKGFYPSDIAVEWESNGQPENNYKTTPPVLDSDGSFFLYSKLTVDKSRWQQGNVFSCSVMHEALHNHYTQKSLSLSPGK

SEQ ID NO: 241 - protein, 393 aa, synthetic construct
  source 1..393: note = XENP31296 Chain 1 - human_IL18_4CS_(GGGGS)1_Fc(216)_IgG1_pI(-)_Isosteric_A_C220 S/PVA_/S267K/L368D/K370S
YFGKLESKLSVIRNLNDQVLFIDQGNRPLFEDMTDSDSRDNAPRTIFIISMYKDSQPRGMAVTISVKSEKISTLSSENKIISFKEMNPPDNIKDTKSDIIFFQRSVPGHDNKMQFESSSYEGYFLASEKERDLFKLILKKEDELGDRSIMFTVQNEDGGGGSEPKSSDKTHTCPPCPAPPVAGPSVFLFPPKPKDTLMISRTPEVTCVVVDVKHEDPEVKFNWYVDGVEVHNAKTKPREEEYNSTYRVVSVLTVLHQDWLNGKEYKCKVSNKALPAPIEKTISKAKGQPREPQVYTLPPSREEMTKNQVSLTCDVSGFYPSDIAVEWESDGQPENNYKTTPPVLDSDGSFFLYSKLTVDKSRWEQGDVFSCSVMHEALHNHYTQKSLSLSPGK

SEQ ID NO: 242 - protein, 231 aa, synthetic construct; identical to SEQ ID NO: 240
  source 1..231: note = XENP31296 Chain 2 - empty_Fc(216)_IgG1_C220S/PVA_/S267K/S364K/E357Q

SEQ ID NO: 243 - protein, 393 aa, synthetic construct
  source 1..393: note = XENP31812 Chain 1 - human_IL18_4CS_D157S_(GGGGS)1_Fc(216)_IgG1_pI(-)_Isosteric_ A_C220S/PVA_/S267K/L368D/K370S
YFGKLESKLSVIRNLNDQVLFIDQGNRPLFEDMTDSDSRDNAPRTIFIISMYKDSQPRGMAVTISVKSEKISTLSSENKIISFKEMNPPDNIKDTKSDIIFFQRSVPGHDNKMQFESSSYEGYFLASEKERDLFKLILKKEDELGDRSIMFTVQNESGGGGSEPKSSDKTHTCPPCPAPPVAGPSVFLFPPKPKDTLMISRTPEVTCVVVDVKHEDPEVKFNWYVDGVEVHNAKTKPREEEYNSTYRVVSVLTVLHQDWLNGKEYKCKVSNKALPAPIEKTISKAKGQPREPQVYTLPPSREEMTKNQVSLTCDVSGFYPSDIAVEWESDGQPENNYKTTPPVLDSDGSFFLYSKLTVDKSRWEQGDVFSCSVMHEALHNHYTQKSLSLSPGK

SEQ ID NO: 244 - protein, 231 aa, synthetic construct; identical to SEQ ID NO: 240
  source 1..231: note = XENP31812 Chain 2 - empty_Fc(216)_IgG1_C220S/PVA_/S267K/S364K/E357Q

SEQ ID NO: 245 - protein, 393 aa, synthetic construct
  source 1..393: note = XENP31813 Chain 1 - human_IL18_4CS_D157A_(GGGGS)1_Fc(216)_IgG1_pI(-)_Isosteric_ A_C220S/PVA_/S267K/L368D/K370S
YFGKLESKLSVIRNLNDQVLFIDQGNRPLFEDMTDSDSRDNAPRTIFIISMYKDSQPRGMAVTISVKSEKISTLSSENKIISFKEMNPPDNIKDTKSDIIFFQRSVPGHDNKMQFESSSYEGYFLASEKERDLFKLILKKEDELGDRSIMFTVQNEAGGGGSEPKSSDKTHTCPPCPAPPVAGPSVFLFPPKPKDTLMISRTPEVTCVVVDVKHEDPEVKFNWYVDGVEVHNAKTKPREEEYNSTYRVVSVLTVLHQDWLNGKEYKCKVSNKALPAPIEKTISKAKGQPREPQVYTLPPSREEMTKNQVSLTCDVSGFYPSDIAVEWESDGQPENNYKTTPPVLDSDGSFFLYSKLTVDKSRWEQGDVFSCSVMHEALHNHYTQKSLSLSPGK

SEQ ID NO: 246 - protein, 231 aa, synthetic construct; identical to SEQ ID NO: 240
  source 1..231: note = XENP31813 Chain 2 - empty_Fc(216)_IgG1_C220S/PVA_/S267K/S364K/E357Q

SEQ ID NO: 247 - protein, 392 aa, synthetic construct
  source 1..392: note = XENP31814 Chain 1 - human_IL18_4CS_D157del_(GGGGS)1_Fc(216)_IgG1_pI(-)_Isosteri c_A_C220S/PVA_/S267K/L368D/K370S
YFGKLESKLSVIRNLNDQVLFIDQGNRPLFEDMTDSDSRDNAPRTIFIISMYKDSQPRGMAVTISVKSEKISTLSSENKIISFKEMNPPDNIKDTKSDIIFFQRSVPGHDNKMQFESSSYEGYFLASEKERDLFKLILKKEDELGDRSIMFTVQNEGGGGSEPKSSDKTHTCPPCPAPPVAGPSVFLFPPKPKDTLMISRTPEVTCVVVDVKHEDPEVKFNWYVDGVEVHNAKTKPREEEYNSTYRVVSVLTVLHQDWLNGKEYKCKVSNKALPAPIEKTISKAKGQPREPQVYTLPPSREEMTKNQVSLTCDVSGFYPSDIAVEWESDGQPENNYKTTPPVLDSDGSFFLYSKLTVDKSRWEQGDVFSCSVMHEALHNHYTQKSLSLSPGK

SEQ ID NO: 248 - protein, 231 aa, synthetic construct; identical to SEQ ID NO: 240
  source 1..231: note = XENP31814 Chain 2 - empty_Fc(216)_IgG1_C220S/PVA_/S267K/S364K/E357Q

SEQ ID NO: 249 - protein, 393 aa, synthetic construct
  source 1..393: note = XENP34106 Chain 1 - human_IL18_4CS_S38E_(GGGGS)1_Fc(216)_IgG1_pI(-)_Isosteric_A _C220S/PVA_/S267K/L368D/K370S
YFGKLESKLSVIRNLNDQVLFIDQGNRPLFEDMTDSDERDNAPRTIFIISMYKDSQPRGMAVTISVKSEKISTLSSENKIISFKEMNPPDNIKDTKSDIIFFQRSVPGHDNKMQFESSSYEGYFLASEKERDLFKLILKKEDELGDRSIMFTVQNEDGGGGSEPKSSDKTHTCPPCPAPPVAGPSVFLFPPKPKDTLMISRTPEVTCVVVDVKHEDPEVKFNWYVDGVEVHNAKTKPREEEYNSTYRVVSVLTVLHQDWLNGKEYKCKVSNKALPAPIEKTISKAKGQPREPQVYTLPPSREEMTKNQVSLTCDVSGFYPSDIAVEWESDGQPENNYKTTPPVLDSDGSFFLYSKLTVDKSRWEQGDVFSCSVMHEALHNHYTQKSLSLSPGK

SEQ ID NO: 250 - protein, 231 aa, synthetic construct; identical to SEQ ID NO: 240
  source 1..231: note = XENP34106 Chain 2 - empty_Fc(216)_IgG1_C220S/PVA_/S267K/S364K/E357Q

SEQ ID NO: 251 - protein, 393 aa, synthetic construct
  source 1..393: note = XENP34107 Chain 1 - human_IL18_4CS_S68E_(GGGGS)1_Fc(216)_IgG1_pI(-)_Isosteric_A _C220S/PVA_/S267K/L368D/K370S
YFGKLESKLSVIRNLNDQVLFIDQGNRPLFEDMTDSDSRDNAPRTIFIISMYKDSQPRGMAVTISVKEEKISTLSSENKIISFKEMNPPDNIKDTKSDIIFFQRSVPGHDNKMQFESSSYEGYFLASEKERDLFKLILKKEDELGDRSIMFTVQNEDGGGGSEPKSSDKTHTCPPCPAPPVAGPSVFLFPPKPKDTLMISRTPEVTCVVVDVKHEDPEVKFNWYVDGVEVHNAKTKPREEEYNSTYRVVSVLTVLHQDWLNGKEYKCKVSNKALPAPIEKTISKAKGQPREPQVYTLPPSREEMTKNQVSLTCDVSGFYPSDIAVEWESDGQPENNYKTTPPVLDSDGSFFLYSKLTVDKSRWEQGDVFSCSVMHEALHNHYTQKSLSLSPGK

SEQ ID NO: 252 - protein, 231 aa, synthetic construct; identical to SEQ ID NO: 240
  source 1..231: note = XENP34107 Chain 2 - empty_Fc(216)_IgG1_C220S/PVA_/S267K/S364K/E357Q

SEQ ID NO: 253 - protein, 393 aa, synthetic construct
  source 1..393: note = XENP34108 Chain 1 - human_IL18_4CS_S76E_(GGGGS)1_Fc(216)_IgG1_pI(-)_Isosteric_A _C220S/PVA_/S267K/L368D/K370S
YFGKLESKLSVIRNLNDQVLFIDQGNRPLFEDMTDSDSRDNAPRTIFIISMYKDSQPRGMAVTISVKSEKISTLSEENKIISFKEMNPPDNIKDTKSDIIFFQRSVPGHDNKMQFESSSYEGYFLASEKERDLFKLILKKEDELGDRSIMFTVQNEDGGGGSEPKSSDKTHTCPPCPAPPVAGPSVFLFPPKPKDTLMISRTPEVTCVVVDVKHEDPEVKFNWYVDGVEVHNAKTKPREEEYNSTYRVVSVLTVLHQDWLNGKEYKCKVSNKALPAPIEKTISKAKGQPREPQVYTLPPSREEMTKNQVSLTCDVSGFYPSDIAVEWESDGQPENNYKTTPPVLDSDGSFFLYSKLTVDKSRWEQGDVFSCSVMHEALHNHYTQKSLSLSPGK

SEQ ID NO: 254 - protein, 231 aa, synthetic construct; identical to SEQ ID NO: 240
  source 1..231: note = XENP34108 Chain 2 - empty_Fc(216)_IgG1_C220S/PVA_/S267K/S364K/E357Q

SEQ ID NO: 255 - protein, 393 aa, synthetic construct
  source 1..393: note = XENP34109 Chain 1 - human_IL18_4CS_S127E_(GGGGS)1_Fc(216)_IgG1_pI(-)_Isosteric_ A_C220S/PVA_/S267K/L368D/K370S
YFGKLESKLSVIRNLNDQVLFIDQGNRPLFEDMTDSDSRDNAPRTIFIISMYKDSQPRGMAVTISVKSEKISTLSSENKIISFKEMNPPDNIKDTKSDIIFFQRSVPGHDNKMQFESSSYEGYFLAEEKERDLFKLILKKEDELGDRSIMFTVQNEDGGGGSEPKSSDKTHTCPPCPAPPVAGPSVFLFPPKPKDTLMISRTPEVTCVVVDVKHEDPEVKFNWYVDGVEVHNAKTKPREEEYNSTYRVVSVLTVLHQDWLNGKEYKCKVSNKALPAPIEKTISKAKGQPREPQVYTLPPSREEMTKNQVSLTCDVSGFYPSDIAVEWESDGQPENNYKTTPPVLDSDGSFFLYSKLTVDKSRWEQGDVFSCSVMHEALHNHYTQKSLSLSPGK

SEQ ID NO: 256 - protein, 231 aa, synthetic construct; identical to SEQ ID NO: 240
  source 1..231: note = XENP34109 Chain 2 - empty_Fc(216)_IgG1_C220S/PVA_/S267K/S364K/E357Q

SEQ ID NO: 257 - protein, 393 aa, synthetic construct
  source 1..393: note = XENP34281 Chain 1 - human_IL18_4CS_S38D_(GGGGS)1_Fc(216)_IgG1_pI(-)_Isosteric_A _C220S/PVA_/S267K/L368D/K370S
YFGKLESKLSVIRNLNDQVLFIDQGNRPLFEDMTDSDDRDNAPRTIFIISMYKDSQPRGMAVTISVKSEKISTLSSENKIISFKEMNPPDNIKDTKSDIIFFQRSVPGHDNKMQFESSSYEGYFLASEKERDLFKLILKKEDELGDRSIMFTVQNEDGGGGSEPKSSDKTHTCPPCPAPPVAGPSVFLFPPKPKDTLMISRTPEVTCVVVDVKHEDPEVKFNWYVDGVEVHNAKTKPREEEYNSTYRVVSVLTVLHQDWLNGKEYKCKVSNKALPAPIEKTISKAKGQPREPQVYTLPPSREEMTKNQVSLTCDVSGFYPSDIAVEWESDGQPENNYKTTPPVLDSDGSFFLYSKLTVDKSRWEQGDVFSCSVMHEALHNHYTQKSLSLSPGK

SEQ ID NO: 258 - protein, 231 aa, synthetic construct; identical to SEQ ID NO: 240
  source 1..231: note = XENP34281 Chain 2 - empty_Fc(216)_IgG1_C220S/PVA_/S267K/S364K/E357Q

SEQ ID NO: 259 - protein, 387 aa, synthetic construct
  source 1..387: note = XENP37825 Chain 1 - human_IL18_4CS_Fc(216)_IgG1_pI(-)_Isosteric_A_C220S/PVA_/S2 67K/L368D/K370S/K447del
YFGKLESKLSVIRNLNDQVLFIDQGNRPLFEDMTDSDSRDNAPRTIFIISMYKDSQPRGMAVTISVKSEKISTLSSENKIISFKEMNPPDNIKDTKSDIIFFQRSVPGHDNKMQFESSSYEGYFLASEKERDLFKLILKKEDELGDRSIMFTVQNEDEPKSSDKTHTCPPCPAPPVAGPSVFLFPPKPKDTLMISRTPEVTCVVVDVKHEDPEVKFNWYVDGVEVHNAKTKPREEEYNSTYRVVSVLTVLHQDWLNGKEYKCKVSNKALPAPIEKTISKAKGQPREPQVYTLPPSREEMTKNQVSLTCDVSGFYPSDIAVEWESDGQPENNYKTTPPVLDSDGSFFLYSKLTVDKSRWEQGDVFSCSVMHEALHNHYTQKSLSLSPG

SEQ ID NO: 260 - protein, 230 aa, synthetic construct
  source 1..230: note = XENP37825 Chain 2 - empty_Fc(216)_IgG1_PVA_/S267K/S364K/E357Q/K447del
EPKSSDKTHTCPPCPAPPVAGPSVFLFPPKPKDTLMISRTPEVTCVVVDVKHEDPEVKFNWYVDGVEVHNAKTKPREEQYNSTYRVVSVLTVLHQDWLNGKEYKCKVSNKALPAPIEKTISKAKGQPREPQVYTLPPSREQMTKNQVKLTCLVKGFYPSDIAVEWESNGQPENNYKTTPPVLDSDGSFFLYSKLTVDKSRWQQGNVFSCSVMHEALHNHYTQKSLSLSPG

SEQ ID NO: 261 - protein, 392 aa, synthetic construct
  source 1..392: note = XENP37826 Chain 1 - hu_IL18_4CS_(GGGGS)1_Fc(216)_IgG1_pI(-)_Isosteric_A_C220S/P VA_/S267K/L368D/K370S/K447del
YFGKLESKLSVIRNLNDQVLFIDQGNRPLFEDMTDSDSRDNAPRTIFIISMYKDSQPRGMAVTISVKSEKISTLSSENKIISFKEMNPPDNIKDTKSDIIFFQRSVPGHDNKMQFESSSYEGYFLASEKERDLFKLILKKEDELGDRSIMFTVQNEDGGGGSEPKSSDKTHTCPPCPAPPVAGPSVFLFPPKPKDTLMISRTPEVTCVVVDVKHEDPEVKFNWYVDGVEVHNAKTKPREEEYNSTYRVVSVLTVLHQDWLNGKEYKCKVSNKALPAPIEKTISKAKGQPREPQVYTLPPSREEMTKNQVSLTCDVSGFYPSDIAVEWESDGQPENNYKTTPPVLDSDGSFFLYSKLTVDKSRWEQGDVFSCSVMHEALHNHYTQKSLSLSPG

SEQ ID NO: 262 - protein, 230 aa, synthetic construct; identical to SEQ ID NO: 260
  source 1..230: note = XENP37826 Chain 2 - empty_Fc(216)_IgG1_PVA_/S267K/S364K/E357Q/K447del

SEQ ID NO: 263 - protein, 387 aa, synthetic construct; identical to SEQ ID NO: 259
  source 1..387: note = XENP38869 Chain 1 - human_IL18_4CS_Fc(216)_IgG1_pI()_Isosteric_A_C220S/PVA_/S26 7K/L368D/K370S/K447del

SEQ ID NO: 264 - protein, 231 aa, synthetic construct
  source 1..231: note = XENP38869 Chain 2 - empty_Fc(216)_IgG1_PVA_/S267K/S364K/E357Q/H435R/Y436F
EPKSSDKTHTCPPCPAPPVAGPSVFLFPPKPKDTLMISRTPEVTCVVVDVKHEDPEVKFNWYVDGVEVHNAKTKPREEQYNSTYRVVSVLTVLHQDWLNGKEYKCKVSNKALPAPIEKTISKAKGQPREPQVYTLPPSREQMTKNQVKLTCLVKGFYPSDIAVEWESNGQPENNYKTTPPVLDSDGSFFLYSKLTVDKSRWQQGNVFSCSVMHEALHNRFTQKSLSLSPGK

SEQ ID NO: 265 - protein, 387 aa, synthetic construct
  source 1..387: note = XENP39138 Chain 1 - human_IL18_C38S_C68S_C127S_Fc(216)_IgG1_pI()_Isosteric_A_C2 20S/PVA_/S267K/L368D/K370S/K447del
YFGKLESKLSVIRNLNDQVLFIDQGNRPLFEDMTDSDSRDNAPRTIFIISMYKDSQPRGMAVTISVKSEKISTLSCENKIISFKEMNPPDNIKDTKSDIIFFQRSVPGHDNKMQFESSSYEGYFLASEKERDLFKLILKKEDELGDRSIMFTVQNEDEPKSSDKTHTCPPCPAPPVAGPSVFLFPPKPKDTLMISRTPEVTCVVVDVKHEDPEVKFNWYVDGVEVHNAKTKPREEEYNSTYRVVSVLTVLHQDWLNGKEYKCKVSNKALPAPIEKTISKAKGQPREPQVYTLPPSREEMTKNQVSLTCDVSGFYPSDIAVEWESDGQPENNYKTTPPVLDSDGSFFLYSKLTVDKSRWEQGDVFSCSVMHEALHNHYTQKSLSLSPG

SEQ ID NO: 266 - protein, 230 aa, synthetic construct; identical to SEQ ID NO: 260
  source 1..230: note = XENP39138 Chain 2 - empty_Fc(216)_IgG1_PVA_/S267K/S364K/E357Q/K447del

SEQ ID NO: 267 - protein, 387 aa, synthetic construct
  source 1..387: note = XENP39139 Chain 1 - human_IL18_C38S_C68S_C76S_Fc(216)_IgG1_pI()_Isosteric_A_C22 0S/PVA_/S267K/L368D/K370S/K447del
YFGKLESKLSVIRNLNDQVLFIDQGNRPLFEDMTDSDSRDNAPRTIFIISMYKDSQPRGMAVTISVKSEKISTLSSENKIISFKEMNPPDNIKDTKSDIIFFQRSVPGHDNKMQFESSSYEGYFLACEKERDLFKLILKKEDELGDRSIMFTVQNEDEPKSSDKTHTCPPCPAPPVAGPSVFLFPPKPKDTLMISRTPEVTCVVVDVKHEDPEVKFNWYVDGVEVHNAKTKPREEEYNSTYRVVSVLTVLHQDWLNGKEYKCKVSNKALPAPIEKTISKAKGQPREPQVYTLPPSREEMTKNQVSLTCDVSGFYPSDIAVEWESDGQPENNYKTTPPVLDSDGSFFLYSKLTVDKSRWEQGDVFSCSVMHEALHNHYTQKSLSLSPG

SEQ ID NO: 268 - protein, 230 aa, synthetic construct; identical to SEQ ID NO: 260
  source 1..230: note = XENP39139 Chain 2 - empty_Fc(216)_IgG1_PVA_/S267K/S364K/E357Q/K447del

SEQ ID NO: 269 - protein, 387 aa, synthetic construct
  source 1..387: note = XENP39140 Chain 1 - human_IL18_C38S_C68S_Fc(216)_IgG1_pI(-)_Isosteric_A_C220S/P VA_/S267K/L368D/K370S/K447del
YFGKLESKLSVIRNLNDQVLFIDQGNRPLFEDMTDSDSRDNAPRTIFIISMYKDSQPRGMAVTISVKSEKISTLSCENKIISFKEMNPPDNIKDTKSDIIFFQRSVPGHDNKMQFESSSYEGYFLACEKERDLFKLILKKEDELGDRSIMFTVQNEDEPKSSDKTHTCPPCPAPPVAGPSVFLFPPKPKDTLMISRTPEVTCVVVDVKHEDPEVKFNWYVDGVEVHNAKTKPREEEYNSTYRVVSVLTVLHQDWLNGKEYKCKVSNKALPAPIEKTISKAKGQPREPQVYTLPPSREEMTKNQVSLTCDVSGFYPSDIAVEWESDGQPENNYKTTPPVLDSDGSFFLYSKLTVDKSRWEQGDVFSCSVMHEALHNHYTQKSLSLSPG

SEQ ID NO: 270 - protein, 230 aa, synthetic construct; identical to SEQ ID NO: 260
  source 1..230: note = XENP39140 Chain 2 - empty_Fc(216)_IgG1_PVA_/S267K/S364K/E357Q/K447del

SEQ ID NO: 271 - protein, 387 aa, synthetic construct
  source 1..387: note = XENP39141 Chain 1 - human_IL18_C68S_Fc(216)_IgG1_pI(-)_Isosteric_A_C220S/PVA_/S 267K/L368D/K370S/K447del
YFGKLESKLSVIRNLNDQVLFIDQGNRPLFEDMTDSDCRDNAPRTIFIISMYKDSQPRGMAVTISVKSEKISTLSCENKIISFKEMNPPDNIKDTKSDIIFFQRSVPGHDNKMQFESSSYEGYFLACEKERDLFKLILKKEDELGDRSIMFTVQNEDEPKSSDKTHTCPPCPAPPVAGPSVFLFPPKPKDTLMISRTPEVTCVVVDVKHEDPEVKFNWYVDGVEVHNAKTKPREEEYNSTYRVVSVLTVLHQDWLNGKEYKCKVSNKALPAPIEKTISKAKGQPREPQVYTLPPSREEMTKNQVSLTCDVSGFYPSDIAVEWESDGQPENNYKTTPPVLDSDGSFFLYSKLTVDKSRWEQGDVFSCSVMHEALHNHYTQKSLSLSPG

SEQ ID NO: 272 - protein, 230 aa, synthetic construct; identical to SEQ ID NO: 260
  source 1..230: note = XENP39141 Chain 2 - empty_Fc(216)_IgG1_PVA_/S267K/S364K/E357Q/K447del

SEQ ID NO: 273 - protein, 387 aa, synthetic construct
  source 1..387: note = XENP39142 Chain 1 - human_IL18_Fc(216)_IgG1_pI(-)_Isosteric_A_C220S/PVA_/S267K/ L368D/K370S/K447del
YFGKLESKLSVIRNLNDQVLFIDQGNRPLFEDMTDSDCRDNAPRTIFIISMYKDSQPRGMAVTISVKCEKISTLSCENKIISFKEMNPPDNIKDTKSDIIFFQRSVPGHDNKMQFESSSYEGYFLACEKERDLFKLILKKEDELGDRSIMFTVQNEDEPKSSDKTHTCPPCPAPPVAGPSVFLFPPKPKDTLMISRTPEVTCVVVDVKHEDPEVKFNWYVDGVEVHNAKTKPREEEYNSTYRVVSVLTVLHQDWLNGKEYKCKVSNKALPAPIEKTISKAKGQPREPQVYTLPPSREEMTKNQVSLTCDVSGFYPSDIAVEWESDGQPENNYKTTPPVLDSDGSFFLYSKLTVDKSRWEQGDVFSCSVMHEALHNHYTQKSLSLSPG

SEQ ID NO: 274 - protein, 230 aa, synthetic construct; identical to SEQ ID NO: 260
  source 1..230: note = XENP39142 Chain 2 - empty_Fc(216)_IgG1_PVA_/S267K/S364K/E357Q/K447del

SEQ ID NO: 275 - protein, 387 aa, synthetic construct
  source 1..387: note = XENP39149 Chain 1 - human_IL18_4CS/K89A_Fc(216)_IgG1_pI(-)_Isosteric_A_C220S/PV A_/S267K/L368D/K370S/K447del
YFGKLESKLSVIRNLNDQVLFIDQGNRPLFEDMTDSDSRDNAPRTIFIISMYADSQPRGMAVTISVKSEAISTLSSENKIISFKEMNPPDNIKDTKSDIIFFQRSVPGHDNKMQFESSSYEGYFLASEKERDLFKLILKKEDELGDRSIMFTVQNEDEPKSSDKTHTCPPCPAPPVAGPSVFLFPPKPKDTLMISRTPEVTCVVVDVKHEDPEVKFNWYVDGVEVHNAKTKPREEEYNSTYRVVSVLTVLHQDWLNGKEYKCKVSNKALPAPIEKTISKAKGQPREPQVYTLPPSREEMTKNQVSLTCDVSGFYPSDIAVEWESDGQPENNYKTTPPVLDSDGSFFLYSKLTVDKSRWEQGDVFSCSVMHEALHNHYTQKSLSLSPG

SEQ ID NO: 276 - protein, 230 aa, synthetic construct; identical to SEQ ID NO: 260
  source 1..230: note = XENP39149 Chain 2 - empty_Fc(216)_IgG1_PVA_/S267K/S364K/E357Q/K447del

SEQ ID NO: 277 - protein, 387 aa, synthetic construct
  source 1..387: note = XENP39150 Chain 1 - hu_IL18_4CS/E42A/K89A_Fc(216)_IgG1_pI(-)_Isosteric_A_C220S/ PVA_/S267K/L368D/K370S/K447del
YFGKLASKLSVIRNLNDQVLFIDQGNRPLFEDMTDSDSRDNAPRTIFIISMYADSQPRGMAVTISVKSEAISTLSSENKIISFKEMNPPDNIKDTKSDIIFFQRSVPGHDNKMQFESSSYEGYFLASEKERDLFKLILKKEDELGDRSIMFTVQNEDEPKSSDKTHTCPPCPAPPVAGPSVFLFPPKPKDTLMISRTPEVTCVVVDVKHEDPEVKFNWYVDGVEVHNAKTKPREEEYNSTYRVVSVLTVLHQDWLNGKEYKCKVSNKALPAPIEKTISKAKGQPREPQVYTLPPSREEMTKNQVSLTCDVSGFYPSDIAVEWESDGQPENNYKTTPPVLDSDGSFFLYSKLTVDKSRWEQGDVFSCSVMHEALHNHYTQKSLSLSPG

SEQ ID NO: 278 - protein, 230 aa, synthetic construct; identical to SEQ ID NO: 260
  source 1..230: note = XENP39150 Chain 2 - empty_Fc(216)_IgG1_PVA_/S267K/S364K/E357Q/K447del

SEQ ID NO: 279 - protein, 387 aa, synthetic construct
  source 1..387: note = XENP39151 Chain 1 - human_IL18_4CS_H6-12_Fc(216)_IgG1_pI(-)_Isosteric_A_C220S/P VA_/S267K/L368D/K370S/K447del
YFGKLESKLSVIRNLNDQVLFIDQGNRPLFEDMTDSDSRDNAPRTIFIISKYSDSLARGLAVTISVKSEKISTLSSENKIISFKEMNPPDNIKDTKSDIIFFQRDVPGHSRKMQFESSSYEGYFLASEKERDLFKLILKKEDELGDRSIMFTVQNEDEPKSSDKTHTCPPCPAPPVAGPSVFLFPPKPKDTLMISRTPEVTCVVVDVKHEDPEVKFNWYVDGVEVHNAKTKPREEEYNSTYRVVSVLTVLHQDWLNGKEYKCKVSNKALPAPIEKTISKAKGQPREPQVYTLPPSREEMTKNQVSLTCDVSGFYPSDIAVEWESDGQPENNYKTTPPVLDSDGSFFLYSKLTVDKSRWEQGDVFSCSVMHEALHNHYTQKSLSLSPG

SEQ ID NO: 280 - protein, 230 aa, synthetic construct; identical to SEQ ID NO: 260
  source 1..230: note = XENP39151 Chain 2 - empty_Fc(216)_IgG1_PVA_/S267K/S364K/E357Q/K447del

SEQ ID NO: 281 - protein, 387 aa, synthetic construct
  source 1..387: note = XENP39152 Chain 1 - human_IL18_4CS_H6-31_Fc(216)_IgG1_pI(-)_Isosteric_A_C220S/P VA_/S267K/L368D/K370S/K447del
YFGKLESKLSVIRNLNDQVLFIDQGNRPLFEDMTDSDSRDNAPRTIFIISKYGDSGARGLAVTISVKSEKISTLSSENKIISFKEMNPPDNIKDTKSDIIFFERDVPGHSGKVQFESSSYEGYFLASEKERDLFKLILKKEDELGDRSIMFTVQNEDEPKSSDKTHTCPPCPAPPVAGPSVFLFPPKPKDTLMISRTPEVTCVVVDVKHEDPEVKFNWYVDGVEVHNAKTKPREEEYNSTYRVVSVLTVLHQDWLNGKEYKCKVSNKALPAPIEKTISKAKGQPREPQVYTLPPSREEMTKNQVSLTCDVSGFYPSDIAVEWESDGQPENNYKTTPPVLDSDGSFFLYSKLTVDKSRWEQGDVFSCSVMHEALHNHYTQKSLSLSPG

SEQ ID NO: 282 - protein, 230 aa, synthetic construct; identical to SEQ ID NO: 260
  source 1..230: note = XENP39152 Chain 2 - empty_Fc(216)_IgG1_PVA_/S267K/S364K/E357Q/K447del

SEQ ID NO: 283 - protein, 387 aa, synthetic construct; identical to SEQ ID NO: 259
  source 1..387: note = XENP39672 Chain 1 - human_IL18_4CS_Fc(216)_IgG1_pI(-)_Isosteric_A_C220S/PVA_/S2 67K/L368D/K370S/K447del

SEQ ID NO: 284 - protein, 231 aa, synthetic construct
  source 1..231: note = XENP39672 Chain 2 - empty_Fc(216)_IgG1_ISO(+RR)_C220S_PVA_/S267K/S364K/E357Q
ERKSSDKTHTCPRCPAPPVAGPSVFLFPPKPKDTLMISRTPEVTCVVVDVKHEDPEVKFKWYVDGVEVHNAKTKPREEQYNSTYRVVSVLTVLHQDWLNGKEYKCKVSNKALPAPIEKTISKAKGQPREPQVYTLPPSREQMTKNQVKLTCLVKGFYPSDIAVEWESNGQPENNYKTTPPVLDSDGSFFLYSKLTVDKSRWQQGNVFSCSVMHEALHNHYTQKSLSLSPGK

SEQ ID NO: 285 - protein, 387 aa, synthetic construct
  source 1..387: note = XENP39804 Chain 1 - human_IL18_4CS_E31Q_Fc(216)_IgG1_pI(-)_Isosteric_A_C220S/PV A_/S267K/L368D/K370S/K447del
YFGKLESKLSVIRNLNDQVLFIDQGNRPLFQDMTDSDSRDNAPRTIFIISMYKDSQPRGMAVTISVKSEKISTLSSENKIISFKEMNPPDNIKDTKSDIIFFQRSVPGHDNKMQFESSSYEGYFLASEKERDLFKLILKKEDELGDRSIMFTVQNDEPKSSDKTHTCPPCPAPPVAGPSVFLFPPKPKDTLMISRTPEVTCVVVDVKHEDPEVKFNWYVDGVEVHNAKTKPREEEYNSTYRVVSVLTVLHQDWLNGKEYKCKVSNKALPAPIEKTISKAKGQPREPQVYTLPPSREEMTKNQVSLTCDVSGFYPSDIAVEWESDGQPENNYKTTPPVLDSDGSFFLYSKLTVDKSRWEQGDVFSCSVMHEALHNHYTQKSLSLSPGK

SEQ ID NO: 286 - protein, 230 aa, synthetic construct; identical to SEQ ID NO: 260
  source 1..230: note = XENP39804 Chain 2 - empty_Fc(216)_IgG1_PVA_/S267K/S364K/E357Q/K447del

SEQ ID NO: 287 - protein, 387 aa, synthetic construct; identical to SEQ ID NO: 285
  source 1..387: note = XENP39805 Chain 1-human_IL18_4CS_E31Q_Fc(216)_IgG1_pI(-)_Isosteric_A_C220S/ PVA_/S267K/L368D/K370S/K447del

SEQ ID NO: 288 - protein, 231 aa, synthetic construct; identical to SEQ ID NO: 284
  source 1..231: note = XENP39805 Chain 2 - empty_Fc(216)_IgG1_ISO(+RR)_C220S/PVA_/S267K/S364K/E357Q

SEQ ID NO: 289 - protein, 387 aa, synthetic construct; identical to SEQ ID NO: 259
  source 1..387: note = XENP40024 Chain 1 - human_IL18_4CS_Fc(216)_IgG1_pI(-)_Isosteric_A_C220S/PVA_/S2 67K/L368D/K370S/K447del

SEQ ID NO: 290 - protein, 230 aa, synthetic construct
  source 1..230: note = XENP40024 Chain 2 - empty_Fc(216)_IgG1_ISO(+RR)_C220S/PVA_/S267K/S364K/E357Q/H4 35R/Y436Y/K447del
ERKSSDKTHTCPRCPAPPVAGPSVFLFPPKPKDTLMISRTPEVTCVVVDVKHEDPEVKFKWYVDGVEVHNAKTKPREEQYNSTYRVVSVLTVLHQDWLNGKEYKCKVSNKALPAPIEKTISKAKGQPREPQVYTLPPSREQMTKNQVKLTCLVKGFYPSDIAVEWESNGQPENNYKTTPPVLDSDGSFFLYSKLTVDKSRWQQGNVFSCSVMHEALHNRFTQKSLSLSPG

SEQ ID NO: 291 - protein, 387 aa, synthetic construct
  source 1..387: note = XENP40025 Chain 1 - human_IL18_4CS_N14C_E31Q_S127C_Fc(216)_IgG1_pI(-)_Isosteric _A_C220S/PVA_/S267K/L368D/K370S/K447del
YFGKLESKLSVIRCLNDQVLFIDQGNRPLFQDMTDSDSRDNAPRTIFIISMYKDSQPRGMAVTISVKSEKISTLSSENKIISFKEMNPPDNIKDTKSDIIFFQRSVPGHDNKMQFESSSYEGYFLACEKERDLFKLILKKEDELGDRSIMFTVQNEDEPKSSDKTHTCPPCPAPPVAGPSVFLFPPKPKDTLMISRTPEVTCVVVDVKHEDPEVKFNWYVDGVEVHNAKTKPREEEYNSTYRVVSVLTVLHQDWLNGKEYKCKVSNKALPAPIEKTISKAKGQPREPQVYTLPPSREEMTKNQVSLTCDVSGFYPSDIAVEWESDGQPENNYKTTPPVLDSDGSFFLYSKLTVDKSRWEQGDVFSCSVMHEALHNHYTQKSLSLSPG

SEQ ID NO: 292 - protein, 230 aa, synthetic construct; identical to SEQ ID NO: 260
  source 1..230: note = XENP40025 Chain 2 - empty_Fc(216)_IgG1_PVA_/S267K/S364K/E357Q/K447del

SEQ ID NO: 293 - protein, 444 aa, synthetic construct
  source 1..444: note = XENP37827 Chain 1 - SilentFv_H0_Fc(216)_IgG1_PVA_/S267K/S364K/E357Q/K447del
QVQLQESGPGLVRPSQTLSLTCTVSGFSLTGYGVNWVRQPPGRGLEWIGMIWGDGNTDYNSALKSRVTMLKDTSKNQFSLRLSSVTAADTAVYYCARERDYRLDYWGQGSLVTVSSASTKGPSVFPLAPSSKSTSGGTAALGCLVKDYFPEPVTVSWNSGALTSGVHTFPAVLQSSGLYSLSSVVTVPSSSLGTQTYICNVNHKPSNTKVDKKVEPKSCDKTHTCPPCPAPPVAGPSVFLFPPKPKDTLMISRTPEVTCVVVDVKHEDPEVKFNWYVDGVEVHNAKTKPREEQYNSTYRVVSVLTVLHQDWLNGKEYKCKVSNKALPAPIEKTISKAKGQPREPQVYTLPPSREQMTKNQVKLTCLVKGFYPSDIAVEWESNGQPENNYKTTPPVLDSDGSFFLYSKLTVDKSRWQQGNVFSCSVMHEALHNHYTQKSLSLSPG

SEQ ID NO: 294 - protein, 387 aa, synthetic construct; identical to SEQ ID NO: 259
  source 1..387: note = XENP37827 Chain 2 - human_IL18_4CS_Fc(216)_IgG1_pI(-)_Isosteric_A_C220S/PVA_/S2 67K/L368D/K370S/K447del

SEQ ID NO: 295 - protein, 214 aa, synthetic construct
  source 1..214: note = XENP37827 Chain 3 - SilentFv_L0 Light Chain
DIQMTQSPSSLSASVGDRVTITCRASGNIHNYLAWYQQKPGKAPKLLIYYTTTLADGVPSRFSGSGSGTDYTFTISSLQPEDIATYYCQHFWSTPRTFGQGTKVEIKRTVAAPSVFIFPPSDEQLKSGTASVVCLLNNFYPREAKVQWKVDNALQSGNSQESVTEQDSKDSTYSLSSTLTLSKADYEKHKVYACEVTHQGLSSPVTKSFNRGEC

SEQ ID NO: 296 - protein, 444 aa, synthetic construct; identical to SEQ ID NO: 293
  source 1..444: note = XENP37828 Chain 1 - SilentFv_H0_Fc(216)_IgG1_PVA_/S267K/S364K/E357Q/K447del

SEQ ID NO: 297 - protein, 392 aa, synthetic construct; identical to SEQ ID NO: 261
  source 1..392: note = XENP37828 Chain 2 - human_IL18_4CS_(GGGGS)1_Fc(216)_IgG1_pI(-)_Isosteric_A_C220 S/PVA_/S267K/L368D/K370S/K447del

SEQ ID NO: 298 - protein, 214 aa, synthetic construct; identical to SEQ ID NO: 295
  source 1..214: note = XENP37828 Chain 3 - SilentFv_L0 Light Chain

SEQ ID NO: 299 - protein, 444 aa, synthetic construct; identical to SEQ ID NO: 293
  source 1..444: note = XENP38850 Chain 1 - SilentFv_H0_Fc(216)_IgG1_PVA_/S267K/S364K/E357Q/K447del

SEQ ID NO: 300 - protein, 387 aa, synthetic construct
  source 1..387: note = XENP38850 Chain 2 - human_IL18_4CS_Y1F_Fc(216)_IgG1_pI(-)_Isosteric_A_C220S/PVA _/S267K/L368D/K370S/K447del
FFGKLESKLSVIRNLNDQVLFIDQGNRPLFEDMTDSDSRDNAPRTIFIISMYKDSQPRGMAVTISVKSEKISTLSSENKIISFKEMNPPDNIKDTKSDIIFFQRSVPGHDNKMQFESSSYEGYFLASEKERDLFKLILKKEDELGDRSIMFTVQNDEPKSSDKTHTCPPCPAPPVAGPSVFLFPPKPKDTLMISRTPEVTCVVVDVKHEDPEVKFNWYVDGVEVHNAKTKPREEEYNSTYRVVSVLTVLHQDWLNGKEYKCKVSNKALPAPIEKTISKAKGQPREPQVYTLPPSREEMTKNQVSLTCDVSGFYPSDIAVEWESDGQPENNYKTTPPVLDSDGSFFLYSKLTVDKSRWEQGDVFSCSVMHEALHNHYTQKSLSLSPGK

SEQ ID NO: 301 - protein, 214 aa, synthetic construct; identical to SEQ ID NO: 295
  source 1..214: note = XENP38850 Chain 3 - SilentFv_L0 Light Chain

SEQ ID NO: 302 - protein, 444 aa, synthetic construct; identical to SEQ ID NO: 293
  source 1..444: note = XENP38851 Chain 1 - SilentFv_H0_Fc(216)_IgG1_PVA_/S267K/S364K/E357Q/K447del

SEQ ID NO: 303 - protein, 387 aa, synthetic construct
  source 1..387: note = XENP38851 Chain 2 - human_IL18_4CS_Y1H_Fc(216)_IgG1_pI(-)_Isosteric_A_C220S/PVA _/S267K/L368D/K370S/K447del
HFGKLESKLSVIRNLNDQVLFIDQGNRPLFEDMTDSDSRDNAPRTIFIISMYKDSQPRGMAVTISVKSEKISTLSSENKIISFKEMNPPDNIKDTKSDIIFFQRSVPGHDNKMQFESSSYEGYFLASEKERDLFKLILKKEDELGDRSIMFTVQNDEPKSSDKTHTCPPCPAPPVAGPSVFLFPPKPKDTLMISRTPEVTCVVVDVKHEDPEVKFNWYVDGVEVHNAKTKPREEEYNSTYRVVSVLTVLHQDWLNGKEYKCKVSNKALPAPIEKTISKAKGQPREPQVYTLPPSREEMTKNQVSLTCDVSGFYPSDIAVEWESDGQPENNYKTTPPVLDSDGSFFLYSKLTVDKSRWEQGDVFSCSVMHEALHNHYTQKSLSLSPGK

SEQ ID NO: 304 - protein, 214 aa, synthetic construct; identical to SEQ ID NO: 295
  source 1..214: note = XENP38851 Chain 3 - SilentFv_L0 Light Chain

SEQ ID NO: 305 - protein, 444 aa, synthetic construct; identical to SEQ ID NO: 293
  source 1..444: note = XENP38852 Chain 1 - SilentFv_H0_Fc(216)_IgG1_PVA_/S267K/S364K/E357Q/K447del

SEQ ID NO: 306 - protein, 387 aa, synthetic construct
  source 1..387: note = XENP38852 Chain 2 - human_IL18_4CS_E6A_Fc(216)_IgG1_pI(-)_Isosteric_A_C220S/PVA _/S267K/L368D/K370S/K447del
YFGKLASKLSVIRNLNDQVLFIDQGNRPLFEDMTDSDSRDNAPRTIFIISMYKDSQPRGMAVTISVKSEKISTLSSENKIISFKEMNPPDNIKDTKSDIIFFQRSVPGHDNKMQFESSSYEGYFLASEKERDLFKLILKKEDELGDRSIMFTVQNDEPKSSDKTHTCPPCPAPPVAGPSVFLFPPKPKDTLMISRTPEVTCVVVDVKHEDPEVKFNWYVDGVEVHNAKTKPREEEYNSTYRVVSVLTVLHQDWLNGKEYKCKVSNKALPAPIEKTISKAKGQPREPQVYTLPPSREEMTKNQVSLTCDVSGFYPSDIAVEWESDGQPENNYKTTPPVLDSDGSFFLYSKLTVDKSRWEQGDVFSCSVMHEALHNHYTQKSLSLSPGK

SEQ ID NO: 307 - protein, 214 aa, synthetic construct; identical to SEQ ID NO: 295
  source 1..214: note = XENP38852 Chain 3 - SilentFv_L0 Light Chain

SEQ ID NO: 308 - protein, 444 aa, synthetic construct; identical to SEQ ID NO: 293
  source 1..444: note = XENP38853 Chain 1 - SilentFv_H0_Fc(216)_IgG1_PVA_/S267K/S364K/E357Q/K447del

SEQ ID NO: 309 - protein, 387 aa, synthetic construct
  source 1..387: note = XENP38853 Chain 2 - human_IL18_4CS_E6Q_Fc(216)_IgG1_pI(-)_Isosteric_A_C220S/PVA _/S267K/L368D/K370S/K447del
YFGKLQSKLSVIRNLNDQVLFIDQGNRPLFEDMTDSDSRDNAPRTIFIISMYKDSQPRGMAVTISVKSEKISTLSSENKIISFKEMNPPDNIKDTKSDIIFFQRSVPGHDNKMQFESSSYEGYFLASEKERDLFKLILKKEDELGDRSIMFTVQNDEPKSSDKTHTCPPCPAPPVAGPSVFLFPPKPKDTLMISRTPEVTCVVVDVKHEDPEVKFNWYVDGVEVHNAKTKPREEEYNSTYRVVSVLTVLHQDWLNGKEYKCKVSNKALPAPIEKTISKAKGQPREPQVYTLPPSREEMTKNQVSLTCDVSGFYPSDIAVEWESDGQPENNYKTTPPVLDSDGSFFLYSKLTVDKSRWEQGDVFSCSVMHEALHNHYTQKSLSLSPGK

SEQ ID NO: 310 - protein, 214 aa, synthetic construct; identical to SEQ ID NO: 295
  source 1..214: note = XENP38853 Chain 3 - SilentFv_L0 Light Chain

SEQ ID NO: 311 - protein, 444 aa, synthetic construct; identical to SEQ ID NO: 293
  source 1..444: note = XENP38854 Chain 1 - SilentFv_H0_Fc(216)_IgG1_PVA_/S267K/S364K/E357Q/K447del

SEQ ID NO: 312 - protein, 387 aa, synthetic construct
  source 1..387: note = XENP38854 Chain 2 - human_IL18_4CS_D17N_Fc(216)_IgG1_pI(-)_Isosteric_A_C220S/PV A_/S267K/L368D/K370S/K447del
YFGKLESKLSVIRNLNNQVLFIDQGNRPLFEDMTDSDSRDNAPRTIFIISMYKDSQPRGMAVTISVKSEKISTLSSENKIISFKEMNPPDNIKDTKSDIIFFQRSVPGHDNKMQFESSSYEGYFLASEKERDLFKLILKKEDELGDRSIMFTVQNDEPKSSDKTHTCPPCPAPPVAGPSVFLFPPKPKDTLMISRTPEVTCVVVDVKHEDPEVKFNWYVDGVEVHNAKTKPREEEYNSTYRVVSVLTVLHQDWLNGKEYKCKVSNKALPAPIEKTISKAKGQPREPQVYTLPPSREEMTKNQVSLTCDVSGFYPSDIAVEWESDGQPENNYKTTPPVLDSDGSFFLYSKLTVDKSRWEQGDVFSCSVMHEALHNHYTQKSLSLSPGK

SEQ ID NO: 313 - protein, 214 aa, synthetic construct; identical to SEQ ID NO: 295
  source 1..214: note = XENP38854 Chain 3 - SilentFv_L0 Light Chain

SEQ ID NO: 314 - protein, 444 aa, synthetic construct; identical to SEQ ID NO: 293
  source 1..444: note = XENP38855 Chain 1 - SilentFv_H0_Fc(216)_IgG1_PVA_/S267K/S364K/E357Q/K447del

SEQ ID NO: 315 - protein, 387 aa, synthetic construct; identical to SEQ ID NO: 285
  source 1..387: note = XENP38855 Chain 2 - human_IL18_4CS_E31Q_Fc(216)_IgG1_pI(-)_Isosteric_A_C220S/PV A_/S267K/L368D/K370S/K447del

SEQ ID NO: 316 - protein, 214 aa, synthetic construct; identical to SEQ ID NO: 295
  source 1..214: note = XENP38855 Chain 3 - SilentFv_L0 Light Chain

SEQ ID NO: 317 - protein, 444 aa, synthetic construct; identical to SEQ ID NO: 293
  source 1..444: note = XENP38856 Chain 1 - SilentFv_H0_Fc(216)_IgG1_PVA_/S267K/S364K/E357Q/K447del

SEQ ID NO: 318 - protein, 387 aa, synthetic construct
  source 1..387: note = XENP38856 Chain 2 - human_IL18_4CS_D35N_Fc(216)_IgG1_pI(-)_Isosteric_A_C220S/PV A_/S267K/L368D/K370S/K447del
YFGKLESKLSVIRNLNDQVLFIDQGNRPLFEDMTNSDSRDNAPRTIFIISMYKDSQPRGMAVTISVKSEKISTLSSENKIISFKEMNPPDNIKDTKSDIIFFQRSVPGHDNKMQFESSSYEGYFLASEKERDLFKLILKKEDELGDRSIMFTVQNDEPKSSDKTHTCPPCPAPPVAGPSVFLFPPKPKDTLMISRTPEVTCVVVDVKHEDPEVKFNWYVDGVEVHNAKTKPREEEYNSTYRVVSVLTVLHQDWLNGKEYKCKVSNKALPAPIEKTISKAKGQPREPQVYTLPPSREEMTKNQVSLTCDVSGFYPSDIAVEWESDGQPENNYKTTPPVLDSDGSFFLYSKLTVDKSRWEQGDVFSCSVMHEALHNHYTQKSLSLSPGK

SEQ ID NO: 319 - protein, 214 aa, synthetic construct; identical to SEQ ID NO: 295
  source 1..214: note = XENP38856 Chain 3 - SilentFv_L0 Light Chain

SEQ ID NO: 320 - protein, 444 aa, synthetic construct; identical to SEQ ID NO: 293
  source 1..444: note = XENP38857 Chain 1 - SilentFv_H0_Fc(216)_IgG1_PVA_/S267K/S364K/E357Q/K447del

SEQ ID NO: 321 - protein, 387 aa, synthetic construct
  source 1..387: note = XENP38857 Chain 2 - human_IL18_4CS_D37N_Fc(216)_IgG1_pI(-)_Isosteric_A_C220S/PV A_/S267K/L368D/K370S/K447del
YFGKLESKLSVIRNLNDQVLFIDQGNRPLFEDMTDSNSRDNAPRTIFIISMYKDSQPRGMAVTISVKSEKISTLSSENKIISFKEMNPPDNIKDTKSDIIFFQRSVPGHDNKMQFESSSYEGYFLASEKERDLFKLILKKEDELGDRSIMFTVQNDEPKSSDKTHTCPPCPAPPVAGPSVFLFPPKPKDTLMISRTPEVTCVVVDVKHEDPEVKFNWYVDGVEVHNAKTKPREEEYNSTYRVVSVLTVLHQDWLNGKEYKCKVSNKALPAPIEKTISKAKGQPREPQVYTLPPSREEMTKNQVSLTCDVSGFYPSDIAVEWESDGQPENNYKTTPPVLDSDGSFFLYSKLTVDKSRWEQGDVFSCSVMHEALHNHYTQKSLSLSPGK

SEQ ID NO: 322 - protein, 214 aa, synthetic construct; identical to SEQ ID NO: 295
  source 1..214: note = XENP38857 Chain 3 - SilentFv_L0 Light Chain

SEQ ID NO: 323 - protein, 444 aa, synthetic construct; identical to SEQ ID NO: 293
  source 1..444: note = XENP38858 Chain 1 - SilentFv_H0_Fc(216)_IgG1_PVA_/S267K/S364K/E357Q/K447del

SEQ ID NO: 324 - protein, 387 aa, synthetic construct
  source 1..387: note = XENP38858 Chain 2 - human_IL18_4CS_D40N_Fc(216)_IgG1_pI(-)_Isosteric_A_C220S/PV A_/S267K/L368D/K370S/K447del
YFGKLESKLSVIRNLNDQVLFIDQGNRPLFEDMTDSDSRNNAPRTIFIISMYKDSQPRGMAVTISVKSEKISTLSSENKIISFKEMNPPDNIKDTKSDIIFFQRSVPGHDNKMQFESSSYEGYFLASEKERDLFKLILKKEDELGDRSIMFTVQNDEPKSSDKTHTCPPCPAPPVAGPSVFLFPPKPKDTLMISRTPEVTCVVVDVKHEDPEVKFNWYVDGVEVHNAKTKPREEEYNSTYRVVSVLTVLHQDWLNGKEYKCKVSNKALPAPIEKTISKAKGQPREPQVYTLPPSREEMTKNQVSLTCDVSGFYPSDIAVEWESDGQPENNYKTTPPVLDSDGSFFLYSKLTVDKSRWEQGDVFSCSVMHEALHNHYTQKSLSLSPGK

SEQ ID NO: 325 - protein, 214 aa, synthetic construct; identical to SEQ ID NO: 295
  source 1..214: note = XENP38858 Chain 3 - SilentFv_L0 Light Chain

SEQ ID NO: 326 - protein, 444 aa, synthetic construct; identical to SEQ ID NO: 293
  source 1..444: note = XENP38859 Chain 1 - SilentFv_H0_Fc(216)_IgG1_PVA_/S267K/S364K/E357Q/K447del

SEQ ID NO: 327 - protein, 387 aa, synthetic construct
  source 1..387: note = XENP38859 Chain 2 - human_IL18_4CS_N41Q_Fc(216)_IgG1_pI(-)_Isosteric_A_C220S/PV A_/S267K/L368D/K370S/K447del
YFGKLESKLSVIRNLNDQVLFIDQGNRPLFEDMTDSDSRDQAPRTIFIISMYKDSQPRGMAVTISVKSEKISTLSSENKIISFKEMNPPDNIKDTKSDIIFFQRSVPGHDNKMQFESSSYEGYFLASEKERDLFKLILKKEDELGDRSIMFTVQNDEPKSSDKTHTCPPCPAPPVAGPSVFLFPPKPKDTLMISRTPEVTCVVVDVKHEDPEVKFNWYVDGVEVHNAKTKPREEEYNSTYRVVSVLTVLHQDWLNGKEYKCKVSNKALPAPIEKTISKAKGQPREPQVYTLPPSREEMTKNQVSLTCDVSGFYPSDIAVEWESDGQPENNYKTTPPVLDSDGSFFLYSKLTVDKSRWEQGDVFSCSVMHEALHNHYTQKSLSLSPGK

SEQ ID NO: 328 - protein, 214 aa, synthetic construct; identical to SEQ ID NO: 295
  source 1..214: note = XENP38859 Chain 3 - SilentFv_L0 Light Chain

SEQ ID NO: 329 - protein, 444 aa, synthetic construct; identical to SEQ ID NO: 293
  source 1..444: note = XENP38860 Chain 1 - SilentFv_H0_Fc(216)_IgG1_PVA_/S267K/S364K/E357Q/K447del

SEQ ID NO: 330 - protein, 387 aa, synthetic construct
  source 1..387: note = XENP38860 Chain 2 - human_IL18_4CS_K53R_Fc(216)_IgG1_pI(-)_Isosteric_A_C220S/PV A_/S267K/L368D/K370S/K447del
YFGKLESKLSVIRNLNDQVLFIDQGNRPLFEDMTDSDSRDNAPRTIFIISMYRDSQPRGMAVTISVKSEKISTLSSENKIISFKEMNPPDNIKDTKSDIIFFQRSVPGHDNKMQFESSSYEGYFLASEKERDLFKLILKKEDELGDRSIMFTVQNDEPKSSDKTHTCPPCPAPPVAGPSVFLFPPKPKDTLMISRTPEVTCVVVDVKHEDPEVKFNWYVDGVEVHNAKTKPREEEYNSTYRVVSVLTVLHQDWLNGKEYKCKVSNKALPAPIEKTISKAKGQPREPQVYTLPPSREEMTKNQVSLTCDVSGFYPSDIAVEWESDGQPENNYKTTPPVLDSDGSFFLYSKLTVDKSRWEQGDVFSCSVMHEALHNHYTQKSLSLSPGK

SEQ ID NO: 331 - protein, 214 aa, synthetic construct; identical to SEQ ID NO: 295
  source 1..214: note = XENP38860 Chain 3 - SilentFv_L0 Light Chain

SEQ ID NO: 332 - protein, 444 aa, synthetic construct; identical to SEQ ID NO: 293
  source 1..444: note = XENP38861 Chain 1 - SilentFv_H0_Fc(216)_IgG1_PVA_/S267K/S364K/E357Q/K447del

SEQ ID NO: 333 - protein, 387 aa, synthetic construct
  source 1..387: note = XENP38861 Chain 2 - human_IL18_4CS_K53H_Fc(216)_IgG1_pI(-)_Isosteric_A_C220S/PV A_/S267K/L368D/K370S/K447del
YFGKLESKLSVIRNLNDQVLFIDQGNRPLFEDMTDSDSRDNAPRTIFIISMYHDSQPRGMAVTISVKSEKISTLSSENKIISFKEMNPPDNIKDTKSDIIFFQRSVPGHDNKMQFESSSYEGYFLASEKERDLFKLILKKEDELGDRSIMFTVQNDEPKSSDKTHTCPPCPAPPVAGPSVFLFPPKPKDTLMISRTPEVTCVVVDVKHEDPEVKFNWYVDGVEVHNAKTKPREEEYNSTYRVVSVLTVLHQDWLNGKEYKCKVSNKALPAPIEKTISKAKGQPREPQVYTLPPSREEMTKNQVSLTCDVSGFYPSDIAVEWESDGQPENNYKTTPPVLDSDGSFFLYSKLTVDKSRWEQGDVFSCSVMHEALHNHYTQKSLSLSPGK

SEQ ID NO: 334 - protein, 214 aa, synthetic construct; identical to SEQ ID NO: 295
  source 1..214: note = XENP38861 Chain 3 - SilentFv_L0 Light Chain

SEQ ID NO: 335 - protein, 444 aa, synthetic construct; identical to SEQ ID NO: 293
  source 1..444: note = XENP38862 Chain 1 - SilentFv_H0_Fc(216)_IgG1_PVA_/S267K/S364K/E357Q/K447del

SEQ ID NO: 336 - protein, 387 aa, synthetic construct
  source 1..387: note = XENP38862 Chain 2 - human_IL18_4CS_K53M_Fc(216)_IgG1_pI(-)_Isosteric_A_C220S/PV A_/S267K/L368D/K370S/K447del
YFGKLESKLSVIRNLNDQVLFIDQGNRPLFEDMTDSDSRDNAPRTIFIISMYMDSQPRGMAVTISVKSEKISTLSSENKIISFKEMNPPDNIKDTKSDIIFFQRSVPGHDNKMQFESSSYEGYFLASEKERDLFKLILKKEDELGDRSIMFTVQNDEPKSSDKTHTCPPCPAPPVAGPSVFLFPPKPKDTLMISRTPEVTCVVVDVKHEDPEVKFNWYVDGVEVHNAKTKPREEEYNSTYRVVSVLTVLHQDWLNGKEYKCKVSNKALPAPIEKTISKAKGQPREPQVYTLPPSREEMTKNQVSLTCDVSGFYPSDIAVEWESDGQPENNYKTTPPVLDSDGSFFLYSKLTVDKSRWEQGDVFSCSVMHEALHNHYTQKSLSLSPGK

SEQ ID NO: 337 - protein, 214 aa, synthetic construct; identical to SEQ ID NO: 295
  source 1..214: note = XENP38862 Chain 3 - SilentFv_L0 Light Chain

SEQ ID NO: 338 - protein, 444 aa, synthetic construct; identical to SEQ ID NO: 293
  source 1..444: note = XENP38863 Chain 1 - SilentFv_H0_Fc(216)_IgG1_PVA_/S267K/S364K/E357Q/K447del

SEQ ID NO: 339 - protein, 387 aa, synthetic construct
  source 1..387: note = XENP38863 Chain 2 - human_IL18_4CS_K53E_Fc(216)_IgG1_pI(-)_Isosteric_A_C220S/PV A_/S267K/L368D/K370S/K447del
YFGKLESKLSVIRNLNDQVLFIDQGNRPLFEDMTDSDSRDNAPRTIFIISMYEDSQPRGMAVTISVKSEKISTLSSENKIISFKEMNPPDNIKDTKSDIIFFQRSVPGHDNKMQFESSSYEGYFLASEKERDLFKLILKKEDELGDRSIMFTVQNDEPKSSDKTHTCPPCPAPPVAGPSVFLFPPKPKDTLMISRTPEVTCVVVDVKHEDPEVKFNWYVDGVEVHNAKTKPREEEYNSTYRVVSVLTVLHQDWLNGKEYKCKVSNKALPAPIEKTISKAKGQPREPQVYTLPPSREEMTKNQVSLTCDVSGFYPSDIAVEWESDGQPENNYKTTPPVLDSDGSFFLYSKLTVDKSRWEQGDVFSCSVMHEALHNHYTQKSLSLSPGK

SEQ ID NO: 340 - protein, 214 aa, synthetic construct; identical to SEQ ID NO: 295
  source 1..214: note = XENP38863 Chain 3 - SilentFv_L0 Light Chain

SEQ ID NO: 341 - protein, 444 aa, synthetic construct; identical to SEQ ID NO: 293
  source 1..444: note = XENP38864 Chain 1 - SilentFv_H0_Fc(216)_IgG1_PVA_/S267K/S364K/E357Q/K447del

SEQ ID NO: 342 - protein, 387 aa, synthetic construct
  source 1..387: note = XENP38864 Chain 2 - human_IL18_4CS_K53Q_Fc(216)_IgG1_pI(-)_Isosteric_A_C220S/PV A_/S267K/L368D/K370S/K447del
YFGKLESKLSVIRNLNDQVLFIDQGNRPLFEDMTDSDSRDNAPRTIFIISMYQDSQPRGMAVTISVKSEKISTLSSENKIISFKEMNPPDNIKDTKSDIIFFQRSVPGHDNKMQFESSSYEGYFLASEKERDLFKLILKKEDELGDRSIMFTVQNDEPKSSDKTHTCPPCPAPPVAGPSVFLFPPKPKDTLMISRTPEVTCVVVDVKHEDPEVKFNWYVDGVEVHNAKTKPREEEYNSTYRVVSVLTVLHQDWLNGKEYKCKVSNKALPAPIEKTISKAKGQPREPQVYTLPPSREEMTKNQVSLTCDVSGFYPSDIAVEWESDGQPENNYKTTPPVLDSDGSFFLYSKLTVDKSRWEQGDVFSCSVMHEALHNHYTQKSLSLSPGK

SEQ ID NO: 343 - protein, 214 aa, synthetic construct; identical to SEQ ID NO: 295
  source 1..214: note = XENP38864 Chain 3 - SilentFv_L0 Light Chain

SEQ ID NO: 344 - protein, 444 aa, synthetic construct; identical to SEQ ID NO: 293
  source 1..444: note = XENP38865 Chain 1 - SilentFv_H0_Fc(216)_IgG1_PVA_/S267K/S364K/E357Q/K447del

SEQ ID NO: 345 - protein, 387 aa, synthetic construct
  source 1..387: note = XENP38865 Chain 2 - human_IL18_4CS_K53A_Fc(216)_IgG1_pI(-)_Isosteric_A_C220S/PV A_/S267K/L368D/K370S/K447del
YFGKLESKLSVIRNLNDQVLFIDQGNRPLFEDMTDSDSRDNAPRTIFIISMYADSQPRGMAVTISVKSEKISTLSSENKIISFKEMNPPDNIKDTKSDIIFFQRSVPGHDNKMQFESSSYEGYFLASEKERDLFKLILKKEDELGDRSIMFTVQNDEPKSSDKTHTCPPCPAPPVAGPSVFLFPPKPKDTLMISRTPEVTCVVVDVKHEDPEVKFNWYVDGVEVHNAKTKPREEEYNSTYRVVSVLTVLHQDWLNGKEYKCKVSNKALPAPIEKTISKAKGQPREPQVYTLPPSREEMTKNQVSLTCDVSGFYPSDIAVEWESDGQPENNYKTTPPVLDSDGSFFLYSKLTVDKSRWEQGDVFSCSVMHEALHNHYTQKSLSLSPGK

SEQ ID NO: 346 - protein, 214 aa, synthetic construct; identical to SEQ ID NO: 295
  source 1..214: note = XENP38865 Chain 3 - SilentFv_L0 Light Chain

SEQ ID NO: 347 - protein, 444 aa, synthetic construct; identical to SEQ ID NO: 293
  source 1..444: note = XENP38866 Chain 1 - SilentFv_H0_Fc(216)_IgG1_PVA_/S267K/S364K/E357Q/K447del

SEQ ID NO: 348 - protein, 387 aa, synthetic construct
  source 1..387: note = XENP38866 Chain 2 - human_IL18_4CS_Q103E_Fc(216)_IgG1_pI(-)_Isosteric_A_C220S/P VA_/S267K/L368D/K370S/K447del
YFGKLESKLSVIRNLNDQVLFIDQGNRPLFEDMTDSDSRDNAPRTIFIISMYKDSQPRGMAVTISVKSEKISTLSSENKIISFKEMNPPDNIKDTKSDIIFFERSVPGHDNKMQFESSSYEGYFLASEKERDLFKLILKKEDELGDRSIMFTVQNDEPKSSDKTHTCPPCPAPPVAGPSVFLFPPKPKDTLMISRTPEVTCVVVDVKHEDPEVKFNWYVDGVEVHNAKTKPREEEYNSTYRVVSVLTVLHQDWLNGKEYKCKVSNKALPAPIEKTISKAKGQPREPQVYTLPPSREEMTKNQVSLTCDVSGFYPSDIAVEWESDGQPENNYKTTPPVLDSDGSFFLYSKLTVDKSRWEQGDVFSCSVMHEALHNHYTQKSLSLSPGK

SEQ ID NO: 349 - protein, 214 aa, synthetic construct; identical to SEQ ID NO: 295
  source 1..214: note = XENP38866 Chain 3 - SilentFv_L0 Light Chain

SEQ ID NO: 350 - protein, 444 aa, synthetic construct; identical to SEQ ID NO: 293
  source 1..444: note = XENP38867 Chain 1 - SilentFv_H0_Fc(216)_IgG1_PVA_/S267K/S364K/E357Q/K447del

SEQ ID NO: 351 - protein, 387 aa, synthetic construct
  source 1..387: note = XENP38867 Chain 2 - human_IL18_4CS_D110N_Fc(216)_IgG1_pI(-)_Isosteric_A_C220S/P VA_/S267K/L368D/K370S/K447del
YFGKLESKLSVIRNLNDQVLFIDQGNRPLFEDMTDSDSRDNAPRTIFIISMYKDSQPRGMAVTISVKSEKISTLSSENKIISFKEMNPPDNIKDTKSDIIFFQRSVPGHNNKMQFESSSYEGYFLASEKERDLFKLILKKEDELGDRSIMFTVQNDEPKSSDKTHTCPPCPAPPVAGPSVFLFPPKPKDTLMISRTPEVTCVVVDVKHEDPEVKFNWYVDGVEVHNAKTKPREEEYNSTYRVVSVLTVLHQDWLNGKEYKCKVSNKALPAPIEKTISKAKGQPREPQVYTLPPSREEMTKNQVSLTCDVSGFYPSDIAVEWESDGQPENNYKTTPPVLDSDGSFFLYSKLTVDKSRWEQGDVFSCSVMHEALHNHYTQKSLSLSPGK

SEQ ID NO: 352 - protein, 214 aa, synthetic construct; identical to SEQ ID NO: 295
  source 1..214: note = XENP38867 Chain 3 - SilentFv_L0 Light Chain

SEQ ID NO: 353 - protein, 444 aa, synthetic construct; identical to SEQ ID NO: 293
  source 1..444: note = XENP38868 Chain 1 - SilentFv_H0_Fc(216)_IgG1_PVA_/S267K/S364K/E357Q/K447del

SEQ ID NO: 354 - protein, 387 aa, synthetic construct
  source 1..387: note = XENP38868 Chain 2 - human_IL18_4CS_N111Q_Fc(216)_IgG1_pI(-)_Isosteric_A_C220S/P VA_/S267K/L368D/K370S/K447del
YFGKLESKLSVIRNLNDQVLFIDQGNRPLFEDMTDSDSRDNAPRTIFIISMYKDSQPRGMAVTISVKSEKISTLSSENKIISFKEMNPPDNIKDTKSDIIFFQRSVPGHDQKMQFESSSYEGYFLASEKERDLFKLILKKEDELGDRSIMFTVQNDEPKSSDKTHTCPPCPAPPVAGPSVFLFPPKPKDTLMISRTPEVTCVVVDVKHEDPEVKFNWYVDGVEVHNAKTKPREEEYNSTYRVVSVLTVLHQDWLNGKEYKCKVSNKALPAPIEKTISKAKGQPREPQVYTLPPSREEMTKNQVSLTCDVSGFYPSDIAVEWESDGQPENNYKTTPPVLDSDGSFFLYSKLTVDKSRWEQGDVFSCSVMHEALHNHYTQKSLSLSPGK

SEQ ID NO: 355 - protein, 214 aa, synthetic construct; identical to SEQ ID NO: 295
  source 1..214: note = XENP38868 Chain 3 - SilentFv_L0 Light Chain

SEQ ID NO: 356 - protein, 444 aa, synthetic construct; identical to SEQ ID NO: 293
  source 1..444: note = XENP38952 Chain 1 - SilentFv_H0_Fc(216)_IgG1_PVA_/S267K/S364K/E357Q/K447del

SEQ ID NO: 357 - protein, 391 aa, synthetic construct
  source 1..391: note = XENP38952 Chain 2 - hu_IL18_4CS/D157del_(GGGGS)1_Fc(216)_IgG1_pI(-)_Isosteric_A _C220S/PVA_/S267K/L368D/K370S/K447del
YFGKLESKLSVIRNLNDQVLFIDQGNRPLFEDMTDSDSRDNAPRTIFIISMYKDSQPRGMAVTISVKSEKISTLSSENKIISFKEMNPPDNIKDTKSDIIFFQRSVPGHDNKMQFESSSYEGYFLASEKERDLFKLILKKEDELGDRSIMFTVQNEGGGGSEPKSSDKTHTCPPCPAPPVAGPSVFLFPPKPKDTLMISRTPEVTCVVVDVKHEDPEVKFNWYVDGVEVHNAKTKPREEEYNSTYRVVSVLTVLHQDWLNGKEYKCKVSNKALPAPIEKTISKAKGQPREPQVYTLPPSREEMTKNQVSLTCDVSGFYPSDIAVEWESDGQPENNYKTTPPVLDSDGSFFLYSKLTVDKSRWEQGDVFSCSVMHEALHNHYTQKSLSLSPG

SEQ ID NO: 358 - protein, 214 aa, synthetic construct; identical to SEQ ID NO: 295
  source 1..214: note = XENP38952 Chain 3 - SilentFv_L0 Light Chain

SEQ ID NO: 359 - protein, 444 aa, synthetic construct; identical to SEQ ID NO: 293
  source 1..444: note = XENP38953 Chain 1 - SilentFv_H0_Fc(216)_IgG1_PVA_/S267K/S364K/E357Q/K447del

SEQ ID NO: 360 - protein, 396 aa, synthetic construct
  source 1..396: note = XENP38953 Chain 2 - hu_IL18_4CS/D157del_(GGGGS)2_Fc(216)_IgG1_pI(-)_Isosteric_A _C220S/PVA_/S267K/L368D/K370S/K447del
YFGKLESKLSVIRNLNDQVLFIDQGNRPLFEDMTDSDSRDNAPRTIFIISMYKDSQPRGMAVTISVKSEKISTLSSENKIISFKEMNPPDNIKDTKSDIIFFQRSVPGHDNKMQFESSSYEGYFLASEKERDLFKLILKKEDELGDRSIMFTVQNEGGGGSGGGGSEPKSSDKTHTCPPCPAPPVAGPSVFLFPPKPKDTLMISRTPEVTCVVVDVKHEDPEVKFNWYVDGVEVHNAKTKPREEEYNSTYRVVSVLTVLHQDWLNGKEYKCKVSNKALPAPIEKTISKAKGQPREPQVYTLPPSREEMTKNQVSLTCDVSGFYPSDIAVEWESDGQPENNYKTTPPVLDSDGSFFLYSKLTVDKSRWEQGDVFSCSVMHEALHNHYTQKSLSLSPG

SEQ ID NO: 361 - protein, 214 aa, synthetic construct; identical to SEQ ID NO: 295
  source 1..214: note = XENP38953 Chain 3 - SilentFv_L0 Light Chain

SEQ ID NO: 362 - protein, 444 aa, synthetic construct; identical to SEQ ID NO: 293
  source 1..444: note = XENP38954 Chain 1 - SilentFv_H0_Fc(216)_IgG1_PVA_/S267K/S364K/E357Q/K447del

SEQ ID NO: 363 - protein, 392 aa, synthetic construct
  source 1..392: note = XENP38954 Chain 2 - human_IL18_4CS_(AGGGG)1_Fc(216)_IgG1_pI(-)_Isosteric_A_C220 S/PVA_/S267K/L368D/K370S/K447del
YFGKLESKLSVIRNLNDQVLFIDQGNRPLFEDMTDSDSRDNAPRTIFIISMYKDSQPRGMAVTISVKSEKISTLSSENKIISFKEMNPPDNIKDTKSDIIFFQRSVPGHDNKMQFESSSYEGYFLASEKERDLFKLILKKEDELGDRSIMFTVQNEDAGGGGEPKSSDKTHTCPPCPAPPVAGPSVFLFPPKPKDTLMISRTPEVTCVVVDVKHEDPEVKFNWYVDGVEVHNAKTKPREEEYNSTYRVVSVLTVLHQDWLNGKEYKCKVSNKALPAPIEKTISKAKGQPREPQVYTLPPSREEMTKNQVSLTCDVSGFYPSDIAVEWESDGQPENNYKTTPPVLDSDGSFFLYSKLTVDKSRWEQGDVFSCSVMHEALHNHYTQKSLSLSPG

SEQ ID NO: 364 - protein, 214 aa, synthetic construct; identical to SEQ ID NO: 295
  source 1..214: note = XENP38954 Chain 3 - SilentFv_L0 Light Chain

SEQ ID NO: 365 - protein, 444 aa, synthetic construct; identical to SEQ ID NO: 293
  source 1..444: note = XENP38955 Chain 1 - SilentFv_H0_Fc(216)_IgG1_PVA_/S267K/S364K/E357Q/K447del

SEQ ID NO: 366 - protein, 397 aa, synthetic construct
  source 1..397: note = XENP38955 Chain 2 - human_IL18_4CS_(AGGGG)2_Fc(216)_IgG1_pI(-)_Isosteric_A_C220 S/PVA_/S267K/L368D/K370S/K447del
YFGKLESKLSVIRNLNDQVLFIDQGNRPLFEDMTDSDSRDNAPRTIFIISMYKDSQPRGMAVTISVKSEKISTLSSENKIISFKEMNPPDNIKDTKSDIIFFQRSVPGHDNKMQFESSSYEGYFLASEKERDLFKLILKKEDELGDRSIMFTVQNEDAGGGGAGGGGEPKSSDKTHTCPPCPAPPVAGPSVFLFPPKPKDTLMISRTPEVTCVVVDVKHEDPEVKFNWYVDGVEVHNAKTKPREEEYNSTYRVVSVLTVLHQDWLNGKEYKCKVSNKALPAPIEKTISKAKGQPREPQVYTLPPSREEMTKNQVSLTCDVSGFYPSDIAVEWESDGQPENNYKTTPPVLDSDGSFFLYSKLTVDKSRWEQGDVFSCSVMHEALHNHYTQKSLSLSPG

SEQ ID NO: 367 - protein, 214 aa, synthetic construct; identical to SEQ ID NO: 295
  source 1..214: note = XENP38955 Chain 3 - SilentFv_L0 Light Chain

SEQ ID NO: 368 - protein, 444 aa, synthetic construct; identical to SEQ ID NO: 293
  source 1..444: note = XENP38956 Chain 1 - SilentFv_H0_Fc(216)_IgG1_PVA_/S267K/S364K/E357Q/K447del

SEQ ID NO: 369 - protein, 392 aa, synthetic construct
  source 1..392: note = XENP38956 Chain 2 - human_IL18_4CS_(EAAAK)1_Fc(216)_IgG1_pI(-)_Isosteric_A_C220 S/PVA_/S267K/L368D/K370S/K447del
YFGKLESKLSVIRNLNDQVLFIDQGNRPLFEDMTDSDSRDNAPRTIFIISMYKDSQPRGMAVTISVKSEKISTLSSENKIISFKEMNPPDNIKDTKSDIIFFQRSVPGHDNKMQFESSSYEGYFLASEKERDLFKLILKKEDELGDRSIMFTVQNEDEAAAKEPKSSDKTHTCPPCPAPPVAGPSVFLFPPKPKDTLMISRTPEVTCVVVDVKHEDPEVKFNWYVDGVEVHNAKTKPREEEYNSTYRVVSVLTVLHQDWLNGKEYKCKVSNKALPAPIEKTISKAKGQPREPQVYTLPPSREEMTKNQVSLTCDVSGFYPSDIAVEWESDGQPENNYKTTPPVLDSDGSFFLYSKLTVDKSRWEQGDVFSCSVMHEALHNHYTQKSLSLSPG

SEQ ID NO: 370 - protein, 214 aa, synthetic construct; identical to SEQ ID NO: 295
  source 1..214: note = XENP38956 Chain 3 - SilentFv_L0 Light Chain

SEQ ID NO: 371 - protein, 444 aa, synthetic construct; identical to SEQ ID NO: 293
  source 1..444: note = XENP38957 Chain 1 - SilentFv_H0_Fc(216)_IgG1_PVA_/S267K/S364K/E357Q/K447del

SEQ ID NO: 372 - protein, 397 aa, synthetic construct
  source 1..397: note = XENP38957 Chain 2 - human_IL18_4CS_(EAAAK)2_Fc(216)_IgG1_pI(-)_Isosteric_A_C220 S/PVA_/S267K/L368D/K370S/K447del
YFGKLESKLSVIRNLNDQVLFIDQGNRPLFEDMTDSDSRDNAPRTIFIISMYKDSQPRGMAVTISVKSEKISTLSSENKIISFKEMNPPDNIKDTKSDIIFFQRSVPGHDNKMQFESSSYEGYFLASEKERDLFKLILKKEDELGDRSIMFTVQNEDEAAAKEAAAKEPKSSDKTHTCPPCPAPPVAGPSVFLFPPKPKDTLMISRTPEVTCVVVDVKHEDPEVKFNWYVDGVEVHNAKTKPREEEYNSTYRVVSVLTVLHQDWLNGKEYKCKVSNKALPAPIEKTISKAKGQPREPQVYTLPPSREEMTKNQVSLTCDVSGFYPSDIAVEWESDGQPENNYKTTPPVLDSDGSFFLYSKLTVDKSRWEQGDVFSCSVMHEALHNHYTQKSLSLSPG

SEQ ID NO: 373 - protein, 214 aa, synthetic construct; identical to SEQ ID NO: 295
  source 1..214: note = XENP38957 Chain 3 - SilentFv_L0 Light Chain

SEQ ID NO: 374 - protein, 444 aa, synthetic construct; identical to SEQ ID NO: 293
  source 1..444: note = XENP39601 Chain 1 - SilentFv_H0_Fc(216)_IgG1_PVA_/S267K/S364K/E357Q/K447del

SEQ ID NO: 375 - protein, 387 aa, synthetic construct; identical to SEQ ID NO: 275
  source 1..387: note = XENP39601 Chain 2 - human_IL18_4CS/K89A_Fc(216)_IgG1_pI(-)_Isosteric_A_C220S/PV A_/S267K/L368D/K370S/K447del

SEQ ID NO: 376 - protein, 214 aa, synthetic construct; identical to SEQ ID NO: 295
  source 1..214: note = XENP39601 Chain 3 - SilentFv_L0 Light Chain

SEQ ID NO: 377 - protein, 444 aa, synthetic construct; identical to SEQ ID NO: 293
  source 1..444: note = XENP39602 Chain 1 - SilentFv_H0_Fc(216)_IgG1_PVA_/S267K/S364K/E357Q/K447del

SEQ ID NO: 378 - protein, 387 aa, synthetic construct; identical to SEQ ID NO: 277
  source 1..387: note = XENP39602 Chain 2 - human_IL18_4CS/E42A/K89A_Fc(216)_IgG1_pI(-)_Isosteric_A_C22 0S/PVA_/S267K/L368D/K370S/K447del

SEQ ID NO: 379 - protein, 214 aa, synthetic construct; identical to SEQ ID NO: 295
  source 1..214: note = XENP39602 Chain 3 - SilentFv_L0 Light Chain

SEQ ID NO: 380 - protein, 444 aa, synthetic construct; identical to SEQ ID NO: 293
  source 1..444: note = XENP39603 Chain 1 - SilentFv_H0_Fc(216)_IgG1_PVA_/S267K/S364K/E357Q/K447del

SEQ ID NO: 381 - protein, 387 aa, synthetic construct; identical to SEQ ID NO: 279
  source 1..387: note = XENP39603 Chain 2 - human_IL18_4CS_H6-12_Fc(216)_IgG1_pI(-)_Isosteric_A_C220S/P VA_/S267K/L368D/K370S/K447del

SEQ ID NO: 382 - protein, 214 aa, synthetic construct; identical to SEQ ID NO: 295
  source 1..214: note = XENP39603 Chain 3 - SilentFv_L0 Light Chain

SEQ ID NO: 383 - protein, 444 aa, synthetic construct; identical to SEQ ID NO: 293
  source 1..444: note = XENP39604 Chain 1 - SilentFv_H0_Fc(216)_IgG1_PVA_/S267K/S364K/E357Q/K447del

SEQ ID NO: 384 - protein, 387 aa, synthetic construct; identical to SEQ ID NO: 281
  source 1..387: note = XENP39604 Chain 2 - human_IL18_4CS_H6-31_Fc(216)_IgG1_pI(-)_Isosteric_A_C220S/P VA_/S267K/L368D/K370S/K447del

SEQ ID NO: 385 - protein, 214 aa, synthetic construct; identical to SEQ ID NO: 295
  source 1..214: note = XENP39604 Chain 3 - SilentFv_L0 Light Chain

SEQ ID NO: 386 - protein, 444 aa, synthetic construct
  source 1..444: note = XENP40027 Chain 1 - SilentFv_H0_Fc(216)_IgG1_PVA_/S267K/S364K/E357Q/H435R/Y436Y /K447del
QVQLQESGPGLVRPSQTLSLTCTVSGFSLTGYGVNWVRQPPGRGLEWIGMIWGDGNTDYNSALKSRVTMLKDTSKNQFSLRLSSVTAADTAVYYCARERDYRLDYWGQGSLVTVSSASTKGPSVFPLAPSSKSTSGGTAALGCLVKDYFPEPVTVSWNSGALTSGVHTFPAVLQSSGLYSLSSVVTVPSSSLGTQTYICNVNHKPSNTKVDKKVEPKSCDKTHTCPPCPAPPVAGPSVFLFPPKPKDTLMISRTPEVTCVVVDVKHEDPEVKFNWYVDGVEVHNAKTKPREEQYNSTYRVVSVLTVLHQDWLNGKEYKCKVSNKALPAPIEKTISKAKGQPREPQVYTLPPSREQMTKNQVKLTCLVKGFYPSDIAVEWESNGQPENNYKTTPPVLDSDGSFFLYSKLTVDKSRWQQGNVFSCSVMHEALHNRFTQKSLSLSPG

SEQ ID NO: 387 - protein, 387 aa, synthetic construct; identical to SEQ ID NO: 285
  source 1..387: note = XENP40027 Chain 2 - human_IL18_4CS_E31Q_Fc(216)_IgG1_pI(-)_Isosteric_A_C220S/PV A_/S267K/L368D/K370S/K447del

SEQ ID NO: 388 - protein, 214 aa, synthetic construct; identical to SEQ ID NO: 295
  source 1..214: note = XENP40027 Chain 3 - SilentFv_L0 Light Chain

SEQ ID NO: 389 - protein, 444 aa, synthetic construct; identical to SEQ ID NO: 293
  source 1..444: note = XENP40046 Chain 1 - SilentFv_H0_Fc(216)_IgG1_PVA_/S267K/S364K/E357Q/K447del

SEQ ID NO: 390 - protein, 387 aa, synthetic construct
  source 1..387: note = XENP40046 Chain 2 - human_IL18_4CS_E31Q_K53A_Fc(216)_IgG1_pI(-)_Isosteric_A_C22 0S/PVA_/S267K/L368D/K370S/K447del
YFGKLESKLSVIRNLNDQVLFIDQGNRPLFQDMTDSDSRDNAPRTIFIISMYADSQPRGMAVTISVKSEKISTLSSENKIISFKEMNPPDNIKDTKSDIIFFQRSVPGHDNKMQFESSSYEGYFLASEKERDLFKLILKKEDELGDRSIMFTVQNEDEPKSSDKTHTCPPCPAPPVAGPSVFLFPPKPKDTLMISRTPEVTCVVVDVKHEDPEVKFNWYVDGVEVHNAKTKPREEEYNSTYRVVSVLTVLHQDWLNGKEYKCKVSNKALPAPIEKTISKAKGQPREPQVYTLPPSREEMTKNQVSLTCDVSGFYPSDIAVEWESDGQPENNYKTTPPVLDSDGSFFLYSKLTVDKSRWEQGDVFSCSVMHEALHNHYTQKSLSLSPG

SEQ ID NO: 391 - protein, 214 aa, synthetic construct; identical to SEQ ID NO: 295
  source 1..214: note = XENP40046 Chain 3 - SilentFv_L0 Light Chain

SEQ ID NO: 392 - protein, 444 aa, synthetic construct; identical to SEQ ID NO: 293
  source 1..444: note = XENP40047 Chain 1 - SilentFv_H0_Fc(216)_IgG1_PVA_/S267K/S364K/E357Q/K447del

SEQ ID NO: 393 - protein, 387 aa, synthetic construct
  source 1..387: note = XENP40047 Chain 2 - hu_IL18_4CS_E31Q_D35N_K53A_Fc(216)_IgG1_pI(-)_Isosteric_A_C 220S/PVA_/S267K/L368D/K370S/K447del
YFGKLESKLSVIRNLNDQVLFIDQGNRPLFQDMTNSDSRDNAPRTIFIISMYADSQPRGMAVTISVKSEKISTLSSENKIISFKEMNPPDNIKDTKSDIIFFQRSVPGHDNKMQFESSSYEGYFLASEKERDLFKLILKKEDELGDRSIMFTVQNEDEPKSSDKTHTCPPCPAPPVAGPSVFLFPPKPKDTLMISRTPEVTCVVVDVKHEDPEVKFNWYVDGVEVHNAKTKPREEEYNSTYRVVSVLTVLHQDWLNGKEYKCKVSNKALPAPIEKTISKAKGQPREPQVYTLPPSREEMTKNQVSLTCDVSGFYPSDIAVEWESDGQPENNYKTTPPVLDSDGSFFLYSKLTVDKSRWEQGDVFSCSVMHEALHNHYTQKSLSLSPG

SEQ ID NO: 394 - protein, 214 aa, synthetic construct; identical to SEQ ID NO: 295
  source 1..214: note = XENP40047 Chain 3 - SilentFv_L0 Light Chain

SEQ ID NO: 395 - protein, 444 aa, synthetic construct; identical to SEQ ID NO: 293
  source 1..444: note = XENP40048 Chain 1 - SilentFv_H0_Fc(216)_IgG1_PVA_/S267K/S364K/E357Q/K447del

SEQ ID NO: 396 - protein, 387 aa, synthetic construct
  source 1..387: note = XENP40048 Chain 2 - hu_IL18_4CS_E31Q_N41Q_K53A_Fc(216)_IgG1_pI(-)_Isosteric_A_C 220S/PVA_/S267K/L368D/K370S/K447del
YFGKLESKLSVIRNLNDQVLFIDQGNRPLFQDMTDSDSRDQAPRTIFIISMYADSQPRGMAVTISVKSEKISTLSSENKIISFKEMNPPDNIKDTKSDIIFFQRSVPGHDNKMQFESSSYEGYFLASEKERDLFKLILKKEDELGDRSIMFTVQNEDEPKSSDKTHTCPPCPAPPVAGPSVFLFPPKPKDTLMISRTPEVTCVVVDVKHEDPEVKFNWYVDGVEVHNAKTKPREEEYNSTYRVVSVLTVLHQDWLNGKEYKCKVSNKALPAPIEKTISKAKGQPREPQVYTLPPSREEMTKNQVSLTCDVSGFYPSDIAVEWESDGQPENNYKTTPPVLDSDGSFFLYSKLTVDKSRWEQGDVFSCSVMHEALHNHYTQKSLSLSPG

SEQ ID NO: 397 - protein, 214 aa, synthetic construct; identical to SEQ ID NO: 295
  source 1..214: note = XENP40048 Chain 3 - SilentFv_L0 Light Chain

SEQ ID NO: 398 - protein, 444 aa, synthetic construct; identical to SEQ ID NO: 293
  source 1..444: note = XENP40049 Chain 1 - SilentFv_H0_Fc(216)_IgG1_PVA_/S267K/S364K/E357Q/K447del

SEQ ID NO: 399 - protein, 387 aa, synthetic construct
  source 1..387: note = XENP40049 Chain 2 - human_IL18_4CS_E31Q_D35N_N41Q_K53A_Fc(216)_IgG1_pI(-)_Isost eric_A_C220S/PVA_/S267K/L368D/K370S/K447del
YFGKLESKLSVIRNLNDQVLFIDQGNRPLFQDMTNSDSRDQAPRTIFIISMYADSQPRGMAVTISVKSEKISTLSSENKIISFKEMNPPDNIKDTKSDIIFFQRSVPGHDNKMQFESSSYEGYFLASEKERDLFKLILKKEDELGDRSIMFTVQNEDEPKSSDKTHTCPPCPAPPVAGPSVFLFPPKPKDTLMISRTPEVTCVVVDVKHEDPEVKFNWYVDGVEVHNAKTKPREEEYNSTYRVVSVLTVLHQDWLNGKEYKCKVSNKALPAPIEKTISKAKGQPREPQVYTLPPSREEMTKNQVSLTCDVSGFYPSDIAVEWESDGQPENNYKTTPPVLDSDGSFFLYSKLTVDKSRWEQGDVFSCSVMHEALHNHYTQKSLSLSPG

SEQ ID NO: 400 - protein, 214 aa, synthetic construct; identical to SEQ ID NO: 295
  source 1..214: note = XENP40049 Chain 3 - SilentFv_L0 Light Chain

SEQ ID NO: 401 - protein, 444 aa, synthetic construct; identical to SEQ ID NO: 293
  source 1..444: note = XENP40050 Chain 1 - SilentFv_H0_Fc(216)_IgG1_PVA_/S267K/S364K/E357Q/K447del

SEQ ID NO: 402 - protein, 387 aa, synthetic construct
  source 1..387: note = XENP40050 Chain 2 - human_IL18_4CS_E31Q_D35N_Fc(216)_IgG1_pI(-)_Isosteric_A_C22 0S/PVA_/S267K/L368D/K370S/K447del
YFGKLESKLSVIRNLNDQVLFIDQGNRPLFQDMTNSDSRDNAPRTIFIISMYKDSQPRGMAVTISVKSEKISTLSSENKIISFKEMNPPDNIKDTKSDIIFFQRSVPGHDNKMQFESSSYEGYFLASEKERDLFKLILKKEDELGDRSIMFTVQNEDEPKSSDKTHTCPPCPAPPVAGPSVFLFPPKPKDTLMISRTPEVTCVVVDVKHEDPEVKFNWYVDGVEVHNAKTKPREEEYNSTYRVVSVLTVLHQDWLNGKEYKCKVSNKALPAPIEKTISKAKGQPREPQVYTLPPSREEMTKNQVSLTCDVSGFYPSDIAVEWESDGQPENNYKTTPPVLDSDGSFFLYSKLTVDKSRWEQGDVFSCSVMHEALHNHYTQKSLSLSPG

SEQ ID NO: 403 - protein, 214 aa, synthetic construct; identical to SEQ ID NO: 295
  source 1..214: note = XENP40050 Chain 3 - SilentFv_L0 Light Chain

SEQ ID NO: 404 - protein, 444 aa, synthetic construct; identical to SEQ ID NO: 293
  source 1..444: note = XENP40051 Chain 1 - SilentFv_H0_Fc(216)_IgG1_PVA_/S267K/S364K/E357Q/K447del

SEQ ID NO: 405 - protein, 387 aa, synthetic construct
  source 1..387: note = XENP40051 Chain 2 - human_IL18_4CS_E31Q_N41Q_Fc(216)_IgG1_pI(-)_Isosteric_A_C22 0S/PVA_/S267K/L368D/K370S/K447del
YFGKLESKLSVIRNLNDQVLFIDQGNRPLFQDMTDSDSRDQAPRTIFIISMYKDSQPRGMAVTISVKSEKISTLSSENKIISFKEMNPPDNIKDTKSDIIFFQRSVPGHDNKMQFESSSYEGYFLASEKERDLFKLILKKEDELGDRSIMFTVQNEDEPKSSDKTHTCPPCPAPPVAGPSVFLFPPKPKDTLMISRTPEVTCVVVDVKHEDPEVKFNWYVDGVEVHNAKTKPREEEYNSTYRVVSVLTVLHQDWLNGKEYKCKVSNKALPAPIEKTISKAKGQPREPQVYTLPPSREEMTKNQVSLTCDVSGFYPSDIAVEWESDGQPENNYKTTPPVLDSDGSFFLYSKLTVDKSRWEQGDVFSCSVMHEALHNHYTQKSLSLSPG

SEQ ID NO: 406 - protein, 214 aa, synthetic construct; identical to SEQ ID NO: 295
  source 1..214: note = XENP40051 Chain 3 - SilentFv_L0 Light Chain

SEQ ID NO: 407 - protein, 444 aa, synthetic construct; identical to SEQ ID NO: 293
  source 1..444: note = XENP40052 Chain 1 - SilentFv_H0_Fc(216)_IgG1_PVA_/S267K/S364K/E357Q/K447del

SEQ ID NO: 408 - protein, 387 aa, synthetic construct
  source 1..387: note = XENP40052 Chain 2 - hu_IL18_4CS_E31Q_D35N_N41Q_Fc(216)_IgG1_pI(-)_Isosteric_A_C 220S/PVA_/S267K/L368D/K370S/K447del
YFGKLESKLSVIRNLNDQVLFIDQGNRPLFQDMTNSDSRDQAPRTIFIISMYKDSQPRGMAVTISVKSEKISTLSSENKIISFKEMNPPDNIKDTKSDIIFFQRSVPGHDNKMQFESSSYEGYFLASEKERDLFKLILKKEDELGDRSIMFTVQNEDEPKSSDKTHTCPPCPAPPVAGPSVFLFPPKPKDTLMISRTPEVTCVVVDVKHEDPEVKFNWYVDGVEVHNAKTKPREEEYNSTYRVVSVLTVLHQDWLNGKEYKCKVSNKALPAPIEKTISKAKGQPREPQVYTLPPSREEMTKNQVSLTCDVSGFYPSDIAVEWESDGQPENNYKTTPPVLDSDGSFFLYSKLTVDKSRWEQGDVFSCSVMHEALHNHYTQKSLSLSPG

SEQ ID NO: 409 - protein, 214 aa, synthetic construct; identical to SEQ ID NO: 295
  source 1..214: note = XENP40052 Chain 3 - SilentFv_L0 Light Chain

SEQ ID NO: 410 - protein, 444 aa, synthetic construct; identical to SEQ ID NO: 293
  source 1..444: note = XENP40053 Chain 1 - SilentFv_H0_Fc(216)_IgG1_PVA_/S267K/S364K/E357Q/K447del

SEQ ID NO: 411 - protein, 387 aa, synthetic construct
  source 1..387: note = XENP40053 Chain 2 - human_IL18_4CS_E31Q_D37N_Fc(216)_IgG1_pI(-)_Isosteric_A_C22 0S/PVA_/S267K/L368D/K370S/K447del
YFGKLESKLSVIRNLNDQVLFIDQGNRPLFQDMTDSNSRDNAPRTIFIISMYKDSQPRGMAVTISVKSEKISTLSSENKIISFKEMNPPDNIKDTKSDIIFFQRSVPGHDNKMQFESSSYEGYFLASEKERDLFKLILKKEDELGDRSIMFTVQNEDEPKSSDKTHTCPPCPAPPVAGPSVFLFPPKPKDTLMISRTPEVTCVVVDVKHEDPEVKFNWYVDGVEVHNAKTKPREEEYNSTYRVVSVLTVLHQDWLNGKEYKCKVSNKALPAPIEKTISKAKGQPREPQVYTLPPSREEMTKNQVSLTCDVSGFYPSDIAVEWESDGQPENNYKTTPPVLDSDGSFFLYSKLTVDKSRWEQGDVFSCSVMHEALHNHYTQKSLSLSPG

SEQ ID NO: 412 - protein, 214 aa, synthetic construct; identical to SEQ ID NO: 295
  source 1..214: note = XENP40053 Chain 3 - SilentFv_L0 Light Chain

SEQ ID NO: 413 - protein, 444 aa, synthetic construct; identical to SEQ ID NO: 293
  source 1..444: note = XENP40054 Chain 1 - SilentFv_H0_Fc(216)_IgG1_PVA_/S267K/S364K/E357Q/K447del

SEQ ID NO: 414 - protein, 387 aa, synthetic construct
  source 1..387: note = XENP40054 Chain 2 - human_IL18_4CS_E31Q_D37N_K53A_Fc(216)_IgG1_pI(-)_Isosteric_ A_C220S/PVA_/S267K/L368D/K370S/K447del
YFGKLESKLSVIRNLNDQVLFIDQGNRPLFQDMTDSNSRDNAPRTIFIISMYADSQPRGMAVTISVKSEKISTLSSENKIISFKEMNPPDNIKDTKSDIIFFQRSVPGHDNKMQFESSSYEGYFLASEKERDLFKLILKKEDELGDRSIMFTVQNEDEPKSSDKTHTCPPCPAPPVAGPSVFLFPPKPKDTLMISRTPEVTCVVVDVKHEDPEVKFNWYVDGVEVHNAKTKPREEEYNSTYRVVSVLTVLHQDWLNGKEYKCKVSNKALPAPIEKTISKAKGQPREPQVYTLPPSREEMTKNQVSLTCDVSGFYPSDIAVEWESDGQPENNYKTTPPVLDSDGSFFLYSKLTVDKSRWEQGDVFSCSVMHEALHNHYTQKSLSLSPG

SEQ ID NO: 415 - protein, 214 aa, synthetic construct; identical to SEQ ID NO: 295
  source 1..214: note = XENP40054 Chain 3 - SilentFv_L0 Light Chain

SEQ ID NO: 416 - protein, 444 aa, synthetic construct; identical to SEQ ID NO: 386
  source 1..444: note = XENP40175 Chain 1 - SilentFv_H0_Fc(216)_IgG1_PVA_/S267K/S364K/E357Q/H435R/Y436Y /K447del

SEQ ID NO: 417 - protein, 387 aa, synthetic construct
  source 1..387: note = XENP40175 Chain 2 - human_IL18_3CS_E31Q_M33C_S38C_Fc(216)_IgG1_pI(-)_Isosteric_ A_C220S/PVA_/S267K/L368D/K370S/K447del
YFGKLESKLSVIRNLNDQVLFIDQGNRPLFQDCTDSDCRDNAPRTIFIISMYKDSQPRGMAVTISVKSEKISTLSSENKIISFKEMNPPDNIKDTKSDIIFFQRSVPGHDNKMQFESSSYEGYFLASEKERDLFKLILKKEDELGDRSIMFTVQNEDEPKSSDKTHTCPPCPAPPVAGPSVFLFPPKPKDTLMISRTPEVTCVVVDVKHEDPEVKFNWYVDGVEVHNAKTKPREEEYNSTYRVVSVLTVLHQDWLNGKEYKCKVSNKALPAPIEKTISKAKGQPREPQVYTLPPSREEMTKNQVSLTCDVSGFYPSDIAVEWESDGQPENNYKTTPPVLDSDGSFFLYSKLTVDKSRWEQGDVFSCSVMHEALHNHYTQKSLSLSPG

SEQ ID NO: 418 - protein, 214 aa, synthetic construct; identical to SEQ ID NO: 295
  source 1..214: note = XENP40175 Chain 3 - SilentFv_L0 Light Chain

SEQ ID NO: 419 - protein, 444 aa, synthetic construct; identical to SEQ ID NO: 386
  source 1..444: note = XENP40176 Chain 1 - SilentFv_H0_Fc(216)_IgG1_PVA_/S267K/S364K/E357Q/H435R/Y436Y /K447del

SEQ ID NO: 420 - protein, 387 aa, synthetic construct
  source 1..387: note = XENP40176 Chain 2 - hu_IL18_3CS_E31Q_S76C_L138C_Fc(216)_IgG1_pI(-)_Isosteric_A_ C220S/PVA_/S267K/L368D/K370S/K447del
YFGKLESKLSVIRNLNDQVLFIDQGNRPLFQDMTDSDSRDNAPRTIFIISMYKDSQPRGMAVTISVKSEKISTLSCENKIISFKEMNPPDNIKDTKSDIIFFQRSVPGHDNKMQFESSSYEGYFLASEKERDLFKLICKKEDELGDRSIMFTVQNEDEPKSSDKTHTCPPCPAPPVAGPSVFLFPPKPKDTLMISRTPEVTCVVVDVKHEDPEVKFNWYVDGVEVHNAKTKPREEEYNSTYRVVSVLTVLHQDWLNGKEYKCKVSNKALPAPIEKTISKAKGQPREPQVYTLPPSREEMTKNQVSLTCDVSGFYPSDIAVEWESDGQPENNYKTTPPVLDSDGSFFLYSKLTVDKSRWEQGDVFSCSVMHEALHNHYTQKSLSLSPG

SEQ ID NO: 421 - protein, 214 aa, synthetic construct; identical to SEQ ID NO: 295
  source 1..214: note = XENP40176 Chain 3 - SilentFv_L0 Light Chain

SEQ ID NO: 422 - protein, 444 aa, synthetic construct; identical to SEQ ID NO: 386
  source 1..444: note = XENP40177 Chain 1 - SilentFv_H0_Fc(216)_IgG1_PVA_/S267K/S364K/E357Q/H435R/Y436Y /K447del

SEQ ID NO: 423 - protein, 387 aa, synthetic construct; identical to SEQ ID NO: 291
  source 1..387: note = XENP40177 Chain 2 - hu_IL18_3CS_N14C_E31Q_S127C_Fc(216)_IgG1_pI(-)_Isosteric_A_ C220S/PVA_/S267K/L368D/K370S/K447del

SEQ ID NO: 424 - protein, 214 aa, synthetic construct; identical to SEQ ID NO: 295
  source 1..214: note = XENP40177 Chain 3 - SilentFv_L0 Light Chain

SEQ ID NO: 425 - protein, 444 aa, synthetic construct; identical to SEQ ID NO: 386
  source 1..444: note = XENP40178 Chain 1 - SilentFv_H0_Fc(216)_IgG1_PVA_/S267K/S364K/E357Q/H435R/Y436Y /K447del

SEQ ID NO: 426 - protein, 387 aa, synthetic construct
  source 1..387: note = XENP40178 Chain 2 - human_IL18_3CS_E31Q_S68I_Fc(216)_IgG1_pI(-)_Isosteric_A_C22 0S/PVA_/S267K/L368D/K370S/K447del
YFGKLESKLSVIRNLNDQVLFIDQGNRPLFQDMTDSDSRDNAPRTIFIISMYKDSQPRGMAVTISVKIEKISTLSSENKIISFKEMNPPDNIKDTKSDIIFFQRSVPGHDNKMQFESSSYEGYFLASEKERDLFKLILKKEDELGDRSIMFTVQNEDEPKSSDKTHTCPPCPAPPVAGPSVFLFPPKPKDTLMISRTPEVTCVVVDVKHEDPEVKFNWYVDGVEVHNAKTKPREEEYNSTYRVVSVLTVLHQDWLNGKEYKCKVSNKALPAPIEKTISKAKGQPREPQVYTLPPSREEMTKNQVSLTCDVSGFYPSDIAVEWESDGQPENNYKTTPPVLDSDGSFFLYSKLTVDKSRWEQGDVFSCSVMHEALHNHYTQKSLSLSPG

SEQ ID NO: 427 - protein, 214 aa, synthetic construct; identical to SEQ ID NO: 295
  source 1..214: note = XENP40178 Chain 3 - SilentFv_L0 Light Chain

SEQ ID NO: 428 - protein, 444 aa, synthetic construct; identical to SEQ ID NO: 386
  source 1..444: note = XENP40179 Chain 1 - SilentFv_H0_Fc(216)_IgG1_PVA_/S267K/S364K/E357Q/H435R/Y436Y /K447del

SEQ ID NO: 429 - protein, 387 aa, synthetic construct
  source 1..387: note = XENP40179 Chain 2 - human_IL18_3CS_E31Q_S68F_Fc(216)_IgG1_pI(-)_Isosteric_A_C22 0S/PVA_/S267K/L368D/K370S/K447del
YFGKLESKLSVIRNLNDQVLFIDQGNRPLFQDMTDSDSRDNAPRTIFIISMYKDSQPRGMAVTISVKFEKISTLSSENKIISFKEMNPPDNIKDTKSDIIFFQRSVPGHDNKMQFESSSYEGYFLASEKERDLFKLILKKEDELGDRSIMFTVQNEDEPKSSDKTHTCPPCPAPPVAGPSVFLFPPKPKDTLMISRTPEVTCVVVDVKHEDPEVKFNWYVDGVEVHNAKTKPREEEYNSTYRVVSVLTVLHQDWLNGKEYKCKVSNKALPAPIEKTISKAKGQPREPQVYTLPPSREEMTKNQVSLTCDVSGFYPSDIAVEWESDGQPENNYKTTPPVLDSDGSFFLYSKLTVDKSRWEQGDVFSCSVMHEALHNHYTQKSLSLSPG

SEQ ID NO: 430 - protein, 214 aa, synthetic construct; identical to SEQ ID NO: 295
  source 1..214: note = XENP40179 Chain 3 - SilentFv_L0 Light Chain

SEQ ID NO: 431 - protein, 444 aa, synthetic construct; identical to SEQ ID NO: 386
  source 1..444: note = XENP40180 Chain 1 - SilentFv_H0_Fc(216)_IgG1_PVA_/S267K/S364K/E357Q/H435R/Y436Y /K447del

SEQ ID NO: 432 - protein, 387 aa, synthetic construct
  source 1..387: note = XENP40180 Chain 2 - human_IL18_3CS_E31Q_S127W_Fc(216)_IgG1_pI(-)_Isosteric_A_C2 20S/PVA_/S267K/L368D/K370S/K447del
YFGKLESKLSVIRNLNDQVLFIDQGNRPLFQDMTDSDSRDNAPRTIFIISMYKDSQPRGMAVTISVKSEKISTLSSENKIISFKEMNPPDNIKDTKSDIIFFQRSVPGHDNKMQFESSSYEGYFLAWEKERDLFKLILKKEDELGDRSIMFTVQNEDEPKSSDKTHTCPPCPAPPVAGPSVFLFPPKPKDTLMISRTPEVTCVVVDVKHEDPEVKFNWYVDGVEVHNAKTKPREEEYNSTYRVVSVLTVLHQDWLNGKEYKCKVSNKALPAPIEKTISKAKGQPREPQVYTLPPSREEMTKNQVSLTCDVSGFYPSDIAVEWESDGQPENNYKTTPPVLDSDGSFFLYSKLTVDKSRWEQGDVFSCSVMHEALHNHYTQKSLSLSPG

SEQ ID NO: 433 - protein, 214 aa, synthetic construct; identical to SEQ ID NO: 295
  source 1..214: note = XENP40180 Chain 3 - SilentFv_L0 Light Chain

SEQ ID NO: 434 - protein, 444 aa, synthetic construct; identical to SEQ ID NO: 386
  source 1..444: note = XENP40181 Chain 1 - SilentFv_H0_Fc(216)_IgG1_PVA_/S267K/S364K/E357Q/H435R/Y436Y /K447del

SEQ ID NO: 435 - protein, 387 aa, synthetic construct
  source 1..387: note = XENP40181 Chain 2 - human_IL18_3CS_E31Q_S127Y_Fc(216)_IgG1_pI(-)_Isosteric_A_C2 20S/PVA_/S267K/L368D/K370S/K447del
YFGKLESKLSVIRNLNDQVLFIDQGNRPLFQDMTDSDSRDNAPRTIFIISMYKDSQPRGMAVTISVKSEKISTLSSENKIISFKEMNPPDNIKDTKSDIIFFQRSVPGHDNKMQFESSSYEGYFLAYEKERDLFKLILKKEDELGDRSIMFTVQNEDEPKSSDKTHTCPPCPAPPVAGPSVFLFPPKPKDTLMISRTPEVTCVVVDVKHEDPEVKFNWYVDGVEVHNAKTKPREEEYNSTYRVVSVLTVLHQDWLNGKEYKCKVSNKALPAPIEKTISKAKGQPREPQVYTLPPSREEMTKNQVSLTCDVSGFYPSDIAVEWESDGQPENNYKTTPPVLDSDGSFFLYSKLTVDKSRWEQGDVFSCSVMHEALHNHYTQKSLSLSPG

SEQ ID NO: 436 - protein, 214 aa, synthetic construct; identical to SEQ ID NO: 295
  source 1..214: note = XENP40181 Chain 3 - SilentFv_L0 Light Chain

SEQ ID NO: 437 - protein, 444 aa, synthetic construct; identical to SEQ ID NO: 386
  source 1..444: note = XENP40182 Chain 1 - SilentFv_H0_Fc(216)_IgG1_PVA_/S267K/S364K/E357Q/H435R/Y436Y /K447del

SEQ ID NO: 438 - protein, 387 aa, synthetic construct
  source 1..387: note = XENP40182 Chain 2 - human_IL18_3CS_E31Q_S127F_Fc(216)_IgG1_pI(-)_Isosteric_A_C2 20S/PVA_/S267K/L368D/K370S/K447del
YFGKLESKLSVIRNLNDQVLFIDQGNRPLFQDMTDSDSRDNAPRTIFIISMYKDSQPRGMAVTISVKSEKISTLSSENKIISFKEMNPPDNIKDTKSDIIFFQRSVPGHDNKMQFESSSYEGYFLAFEKERDLFKLILKKEDELGDRSIMFTVQNEDEPKSSDKTHTCPPCPAPPVAGPSVFLFPPKPKDTLMISRTPEVTCVVVDVKHEDPEVKFNWYVDGVEVHNAKTKPREEEYNSTYRVVSVLTVLHQDWLNGKEYKCKVSNKALPAPIEKTISKAKGQPREPQVYTLPPSREEMTKNQVSLTCDVSGFYPSDIAVEWESDGQPENNYKTTPPVLDSDGSFFLYSKLTVDKSRWEQGDVFSCSVMHEALHNHYTQKSLSLSPG

SEQ ID NO: 439 - protein, 214 aa, synthetic construct; identical to SEQ ID NO: 295
  source 1..214: note = XENP40182 Chain 3 - SilentFv_L0 Light Chain

SEQ ID NO: 440 - protein, 444 aa, synthetic construct; identical to SEQ ID NO: 386
  source 1..444: note = XENP40183 Chain 1 - SilentFv_H0_Fc(216)_IgG1_PVA_/S267K/S364K/E357Q/H435R/Y436Y /K447del

SEQ ID NO: 441 - protein, 387 aa, synthetic construct
  source 1..387: note = XENP40183 Chain 2 - human_IL18_4CS_S10C_E31Q_I49C_Fc(216)_IgG1_pI(-)_Isosteric_ A_C220S/PVA_/S267K/L368D/K370S/K447del
YFGKLESKLCVIRNLNDQVLFIDQGNRPLFQDMTDSDSRDNAPRTIFICSMYKDSQPRGMAVTISVKSEKISTLSSENKIISFKEMNPPDNIKDTKSDIIFFQRSVPGHDNKMQFESSSYEGYFLASEKERDLFKLILKKEDELGDRSIMFTVQNEDEPKSSDKTHTCPPCPAPPVAGPSVFLFPPKPKDTLMISRTPEVTCVVVDVKHEDPEVKFNWYVDGVEVHNAKTKPREEEYNSTYRVVSVLTVLHQDWLNGKEYKCKVSNKALPAPIEKTISKAKGQPREPQVYTLPPSREEMTKNQVSLTCDVSGFYPSDIAVEWESDGQPENNYKTTPPVLDSDGSFFLYSKLTVDKSRWEQGDVFSCSVMHEALHNHYTQKSLSLSPG

SEQ ID NO: 442 - protein, 214 aa, synthetic construct; identical to SEQ ID NO: 295
  source 1..214: note = XENP40183 Chain 3 - SilentFv_L0 Light Chain

SEQ ID NO: 443 - protein, 444 aa, synthetic construct; identical to SEQ ID NO: 386
  source 1..444: note = XENP40184 Chain 1 - SilentFv_H0_Fc(216)_IgG1_PVA_/S267K/S364K/E357Q/H435R/Y436Y /K447del

SEQ ID NO: 444 - protein, 387 aa, synthetic construct
  source 1..387: note = XENP40184 Chain 2 - hu_IL18_4CS_L15C_E31Q_R147C_Fc(216)_IgG1_pI(-)_Isosteric_A_ C220S/PVA_/S267K/L368D/K370S/K447del
YFGKLESKLSVIRNCNDQVLFIDQGNRPLFQDMTDSDSRDNAPRTIFIISMYKDSQPRGMAVTISVKSEKISTLSSENKIISFKEMNPPDNIKDTKSDIIFFQRSVPGHDNKMQFESSSYEGYFLASEKERDLFKLILKKEDELGDCSIMFTVQNEDEPKSSDKTHTCPPCPAPPVAGPSVFLFPPKPKDTLMISRTPEVTCVVVDVKHEDPEVKFNWYVDGVEVHNAKTKPREEEYNSTYRVVSVLTVLHQDWLNGKEYKCKVSNKALPAPIEKTISKAKGQPREPQVYTLPPSREEMTKNQVSLTCDVSGFYPSDIAVEWESDGQPENNYKTTPPVLDSDGSFFLYSKLTVDKSRWEQGDVFSCSVMHEALHNHYTQKSLSLSPG

SEQ ID NO: 445 - protein, 214 aa, synthetic construct; identical to SEQ ID NO: 295
  source 1..214: note = XENP40184 Chain 3 - SilentFv_L0 Light Chain

SEQ ID NO: 446 - protein, 444 aa, synthetic construct; identical to SEQ ID NO: 386
  source 1..444: note = XENP40185 Chain 1 - SilentFv_H0_Fc(216)_IgG1_PVA_/S267K/S364K/E357Q/H435R/Y436Y /K447del

SEQ ID NO: 447 - protein, 387 aa, synthetic construct
  source 1..387: note = XENP40185 Chain 2 - hu_IL18_4CS_P28C_E31Q_L136C_Fc(216)_IgG1_pI(-)_Isosteric_A_ C220S/PVA_/S267K/L368D/K370S/K447del
YFGKLESKLSVIRNLNDQVLFIDQGNRCLFQDMTDSDSRDNAPRTIFIISMYKDSQPRGMAVTISVKSEKISTLSSENKIISFKEMNPPDNIKDTKSDIIFFQRSVPGHDNKMQFESSSYEGYFLASEKERDLFKCILKKEDELGDRSIMFTVQNEDEPKSSDKTHTCPPCPAPPVAGPSVFLFPPKPKDTLMISRTPEVTCVVVDVKHEDPEVKFNWYVDGVEVHNAKTKPREEEYNSTYRVVSVLTVLHQDWLNGKEYKCKVSNKALPAPIEKTISKAKGQPREPQVYTLPPSREEMTKNQVSLTCDVSGFYPSDIAVEWESDGQPENNYKTTPPVLDSDGSFFLYSKLTVDKSRWEQGDVFSCSVMHEALHNHYTQKSLSLSPG

SEQ ID NO: 448 - protein, 214 aa, synthetic construct; identical to SEQ ID NO: 295
  source 1..214: note = XENP40185 Chain 3 - SilentFv_L0 Light Chain

SEQ ID NO: 449 - protein, 444 aa, synthetic construct; identical to SEQ ID NO: 386
  source 1..444: note = XENP40186 Chain 1 - SilentFv_H0_Fc(216)_IgG1_PVA_/S267K/S364K/E357Q/H435R/Y436Y /K447del

SEQ ID NO: 450 - protein, 387 aa, synthetic construct
  source 1..387: note = XENP40186 Chain 2 - human_IL18_4CS_E31Q_S50C_P88C_Fc(216)_IgG1_pI(-)_Isosteric_ A_C220S/PVA_/S267K/L368D/K370S/K447del
YFGKLESKLSVIRNLNDQVLFIDQGNRPLFQDMTDSDSRDNAPRTIFIICMYKDSQPRGMAVTISVKSEKISTLSSENKIISFKEMNCPDNIKDTKSDIIFFQRSVPGHDNKMQFESSSYEGYFLASEKERDLFKLILKKEDELGDRSIMFTVQNEDEPKSSDKTHTCPPCPAPPVAGPSVFLFPPKPKDTLMISRTPEVTCVVVDVKHEDPEVKFNWYVDGVEVHNAKTKPREEEYNSTYRVVSVLTVLHQDWLNGKEYKCKVSNKALPAPIEKTISKAKGQPREPQVYTLPPSREEMTKNQVSLTCDVSGFYPSDIAVEWESDGQPENNYKTTPPVLDSDGSFFLYSKLTVDKSRWEQGDVFSCSVMHEALHNHYTQKSLSLSPG

SEQ ID NO: 451 - protein, 214 aa, synthetic construct; identical to SEQ ID NO: 295
  source 1..214: note = XENP40186 Chain 3 - SilentFv_L0 Light Chain

SEQ ID NO: 452 - protein, 444 aa, synthetic construct; identical to SEQ ID NO: 386
  source 1..444: note = XENP40187 Chain 1 - SilentFv_H0_Fc(216)_IgG1_PVA_/S267K/S364K/E357Q/H435R/Y436Y /K447del

SEQ ID NO: 453 - protein, 387 aa, synthetic construct
  source 1..387: note = XENP40187 Chain 2 - human_IL18_4CS_E31Q_T63C_P88C_Fc(216)_IgG1_pI(-)_Isosteric_ A_C220S/PVA_/S267K/L368D/K370S/K447del
YFGKLESKLSVIRNLNDQVLFIDQGNRPLFQDMTDSDSRDNAPRTIFIISMYKDSQPRGMAVCISVKSEKISTLSSENKIISFKEMNCPDNIKDTKSDIIFFQRSVPGHDNKMQFESSSYEGYFLASEKERDLFKLILKKEDELGDRSIMFTVQNEDEPKSSDKTHTCPPCPAPPVAGPSVFLFPPKPKDTLMISRTPEVTCVVVDVKHEDPEVKFNWYVDGVEVHNAKTKPREEEYNSTYRVVSVLTVLHQDWLNGKEYKCKVSNKALPAPIEKTISKAKGQPREPQVYTLPPSREEMTKNQVSLTCDVSGFYPSDIAVEWESDGQPENNYKTTPPVLDSDGSFFLYSKLTVDKSRWEQGDVFSCSVMHEALHNHYTQKSLSLSPG

SEQ ID NO: 454 - protein, 214 aa, synthetic construct; identical to SEQ ID NO: 295
  source 1..214: note = XENP40187 Chain 3 - SilentFv_L0 Light Chain

SEQ ID NO: 455 - protein, 444 aa, synthetic construct; identical to SEQ ID NO: 386
  source 1..444: note = XENP40188 Chain 1 - SilentFv_H0_Fc(216)_IgG1_PVA_/S267K/S364K/E357Q/H435R/Y436Y /K447del

SEQ ID NO: 456 - protein, 387 aa, synthetic construct
  source 1..387: note = XENP40188 Chain 2 - hu_IL18_4CS_E31Q_V62C_Q103C_Fc(216)_IgG1_pI(-)_Isosteric_A_ C220S/PVA_/S267K/L368D/K370S/K447del
YFGKLESKLSVIRNLNDQVLFIDQGNRPLFQDMTDSDSRDNAPRTIFIISMYKDSQPRGMACTISVKSEKISTLSSENKIISFKEMNPPDNIKDTKSDIIFFCRSVPGHDNKMQFESSSYEGYFLASEKERDLFKLILKKEDELGDRSIMFTVQNEDEPKSSDKTHTCPPCPAPPVAGPSVFLFPPKPKDTLMISRTPEVTCVVVDVKHEDPEVKFNWYVDGVEVHNAKTKPREEEYNSTYRVVSVLTVLHQDWLNGKEYKCKVSNKALPAPIEKTISKAKGQPREPQVYTLPPSREEMTKNQVSLTCDVSGFYPSDIAVEWESDGQPENNYKTTPPVLDSDGSFFLYSKLTVDKSRWEQGDVFSCSVMHEALHNHYTQKSLSLSPG

SEQ ID NO: 457 - protein, 214 aa, synthetic construct; identical to SEQ ID NO: 295
  source 1..214: note = XENP40188 Chain 3 - SilentFv_L0 Light Chain

SEQ ID NO: 458 - protein, 444 aa, synthetic construct; identical to SEQ ID NO: 386
  source 1..444: note = XENP40189 Chain 1 - SilentFv_H0_Fc(216)_IgG1_PVA_/S267K/S364K/E357Q/H435R/Y436Y /K447del

SEQ ID NO: 459 - protein, 387 aa, synthetic construct
  source 1..387: note = XENP40189 Chain 2 - hu_IL18_4CS_S10C_E31Q_N155C_Fc(216)_IgG1_pI(-)_Isosteric_A_ C220S/PVA_/S267K/L368D/K370S/K447del
YFGKLESKLCVIRNLNDQVLFIDQGNRPLFQDMTDSDSRDNAPRTIFIISMYKDSQPRGMAVTISVKSEKISTLSSENKIISFKEMNPPDNIKDTKSDIIFFQRSVPGHDNKMQFESSSYEGYFLASEKERDLFKLILKKEDELGDRSIMFTVQCEDEPKSSDKTHTCPPCPAPPVAGPSVFLFPPKPKDTLMISRTPEVTCVVVDVKHEDPEVKFNWYVDGVEVHNAKTKPREEEYNSTYRVVSVLTVLHQDWLNGKEYKCKVSNKALPAPIEKTISKAKGQPREPQVYTLPPSREEMTKNQVSLTCDVSGFYPSDIAVEWESDGQPENNYKTTPPVLDSDGSFFLYSKLTVDKSRWEQGDVFSCSVMHEALHNHYTQKSLSLSPG

SEQ ID NO: 460 - protein, 214 aa, synthetic construct; identical to SEQ ID NO: 295
  source 1..214: note = XENP40189 Chain 3 - SilentFv_L0 Light Chain

SEQ ID NO: 461 - protein, 444 aa, synthetic construct; identical to SEQ ID NO: 386
  source 1..444: note = XENP40190 Chain 1 - SilentFv_H0_Fc(216)_IgG1_PVA_/S267K/S364K/E357Q/H435R/Y436Y /K447del

SEQ ID NO: 462 - protein, 387 aa, synthetic construct
  source 1..387: note = XENP40190 Chain 2 - human_IL18_4CS_E31Q_S65C_P88C_Fc(216)_IgG1_pI(-)_Isosteric_ A_C220S/PVA_/S267K/L368D/K370S/K447del
YFGKLESKLSVIRNLNDQVLFIDQGNRPLFQDMTDSDSRDNAPRTIFIISMYKDSQPRGMAVTICVKSEKISTLSSENKIISFKEMNCPDNIKDTKSDIIFFQRSVPGHDNKMQFESSSYEGYFLASEKERDLFKLILKKEDELGDRSIMFTVQNEDEPKSSDKTHTCPPCPAPPVAGPSVFLFPPKPKDTLMISRTPEVTCVVVDVKHEDPEVKFNWYVDGVEVHNAKTKPREEEYNSTYRVVSVLTVLHQDWLNGKEYKCKVSNKALPAPIEKTISKAKGQPREPQVYTLPPSREEMTKNQVSLTCDVSGFYPSDIAVEWESDGQPENNYKTTPPVLDSDGSFFLYSKLTVDKSRWEQGDVFSCSVMHEALHNHYTQKSLSLSPG

SEQ ID NO: 463 - protein, 214 aa, synthetic construct; identical to SEQ ID NO: 295
  source 1..214: note = XENP40190 Chain 3 - SilentFv_L0 Light Chain

SEQ ID NO: 464 - protein, 444 aa, synthetic construct; identical to SEQ ID NO: 386
  source 1..444: note = XENP40191 Chain 1 - SilentFv_H0_Fc(216)_IgG1_PVA_/S267K/S364K/E357Q/H435R/Y436Y /K447del

SEQ ID NO: 465 - protein, 387 aa, synthetic construct
  source 1..387: note = XENP40191 Chain 2 - human_IL18_4CS_S7C_E31Q_S50C_Fc(216)_IgG1_pI(-)_Isosteric_A _C220S/PVA_/S267K/L368D/K370S/K447del
YFGKLECKLSVIRNLNDQVLFIDQGNRPLFQDMTDSDSRDNAPRTIFIICMYKDSQPRGMAVTISVKSEKISTLSSENKIISFKEMNPPDNIKDTKSDIIFFQRSVPGHDNKMQFESSSYEGYFLASEKERDLFKLILKKEDELGDRSIMFTVQNEDEPKSSDKTHTCPPCPAPPVAGPSVFLFPPKPKDTLMISRTPEVTCVVVDVKHEDPEVKFNWYVDGVEVHNAKTKPREEEYNSTYRVVSVLTVLHQDWLNGKEYKCKVSNKALPAPIEKTISKAKGQPREPQVYTLPPSREEMTKNQVSLTCDVSGFYPSDIAVEWESDGQPENNYKTTPPVLDSDGSFFLYSKLTVDKSRWEQGDVFSCSVMHEALHNHYTQKSLSLSPG

SEQ ID NO: 466 - protein, 214 aa, synthetic construct; identical to SEQ ID NO: 295
  source 1..214: note = XENP40191 Chain 3 - SilentFv_L0 Light Chain

SEQ ID NO: 467 - protein, 444 aa, synthetic construct; identical to SEQ ID NO: 386
  source 1..444: note = XENP40192 Chain 1 - SilentFv_H0_Fc(216)_IgG1_PVA_/S267K/S364K/E357Q/H435R/Y436Y /K447del

SEQ ID NO: 468 - protein, 387 aa, synthetic construct
  source 1..387: note = XENP40192 Chain 2 - human_IL18_4CS_E31Q_D54C_A61C_Fc(216)_IgG1_pI(-)_Isosteric_ A_C220S/PVA_/S267K/L368D/K370S/K447del
YFGKLESKLSVIRNLNDQVLFIDQGNRPLFQDMTDSDSRDNAPRTIFIISMYKCSQPRGMCVTISVKSEKISTLSSENKIISFKEMNPPDNIKDTKSDIIFFQRSVPGHDNKMQFESSSYEGYFLASEKERDLFKLILKKEDELGDRSIMFTVQNEDEPKSSDKTHTCPPCPAPPVAGPSVFLFPPKPKDTLMISRTPEVTCVVVDVKHEDPEVKFNWYVDGVEVHNAKTKPREEEYNSTYRVVSVLTVLHQDWLNGKEYKCKVSNKALPAPIEKTISKAKGQPREPQVYTLPPSREEMTKNQVSLTCDVSGFYPSDIAVEWESDGQPENNYKTTPPVLDSDGSFFLYSKLTVDKSRWEQGDVFSCSVMHEALHNHYTQKSLSLSPG

SEQ ID NO: 469 - protein, 214 aa, synthetic construct; identical to SEQ ID NO: 295
  source 1..214: note = XENP40192 Chain 3 - SilentFv_L0 Light Chain

SEQ ID NO: 470 - protein, 444 aa, synthetic construct; identical to SEQ ID NO: 386
  source 1..444: note = XENP40193 Chain 1 - SilentFv_H0_Fc(216)_IgG1_PVA_/S267K/S364K/E357Q/H435R/Y436Y /K447del

SEQ ID NO: 471 - protein, 387 aa, synthetic construct
  source 1..387: note = XENP40193 Chain 2 - hu_IL18_4CS_E31Q_A126C_K139C_Fc(216)_IgG1_pI(-)_Isosteric_A _C220S/PVA_/S267K/L368D/K370S/K447del
YFGKLESKLSVIRNLNDQVLFIDQGNRPLFQDMTDSDSRDNAPRTIFIISMYKDSQPRGMAVTISVKSEKISTLSSENKIISFKEMNPPDNIKDTKSDIIFFQRSVPGHDNKMQFESSSYEGYFLCSEKERDLFKLILCKEDELGDRSIMFTVQNEDEPKSSDKTHTCPPCPAPPVAGPSVFLFPPKPKDTLMISRTPEVTCVVVDVKHEDPEVKFNWYVDGVEVHNAKTKPREEEYNSTYRVVSVLTVLHQDWLNGKEYKCKVSNKALPAPIEKTISKAKGQPREPQVYTLPPSREEMTKNQVSLTCDVSGFYPSDIAVEWESDGQPENNYKTTPPVLDSDGSFFLYSKLTVDKSRWEQGDVFSCSVMHEALHNHYTQKSLSLSPG

SEQ ID NO: 472 - protein, 214 aa, synthetic construct; identical to SEQ ID NO: 295
  source 1..214: note = XENP40193 Chain 3 - SilentFv_L0 Light Chain

SEQ ID NO: 473 - protein, 444 aa, synthetic construct; identical to SEQ ID NO: 386
  source 1..444: note = XENP40194 Chain 1 - SilentFv_H0_Fc(216)_IgG1_PVA_/S267K/S364K/E357Q/H435R/Y436Y /K447del

SEQ ID NO: 474 - protein, 387 aa, synthetic construct
  source 1..387: note = XENP40194 Chain 2 - human_IL18_4CS_N14W_E31Q_Fc(216)_IgG1_pI(-)_Isosteric_A_C22 0S/PVA_/S267K/L368D/K370S/K447del
YFGKLESKLSVIRWLNDQVLFIDQGNRPLFQDMTDSDSRDNAPRTIFIISMYKDSQPRGMAVTISVKSEKISTLSSENKIISFKEMNPPDNIKDTKSDIIFFQRSVPGHDNKMQFESSSYEGYFLASEKERDLFKLILKKEDELGDRSIMFTVQNEDEPKSSDKTHTCPPCPAPPVAGPSVFLFPPKPKDTLMISRTPEVTCVVVDVKHEDPEVKFNWYVDGVEVHNAKTKPREEEYNSTYRVVSVLTVLHQDWLNGKEYKCKVSNKALPAPIEKTISKAKGQPREPQVYTLPPSREEMTKNQVSLTCDVSGFYPSDIAVEWESDGQPENNYKTTPPVLDSDGSFFLYSKLTVDKSRWEQGDVFSCSVMHEALHNHYTQKSLSLSPG

SEQ ID NO: 475 - protein, 214 aa, synthetic construct; identical to SEQ ID NO: 295
  source 1..214: note = XENP40194 Chain 3 - SilentFv_L0 Light Chain

SEQ ID NO: 476 - protein, 444 aa, synthetic construct; identical to SEQ ID NO: 386
  source 1..444: note = XENP40195 Chain 1 - SilentFv_H0_Fc(216)_IgG1_PVA_/S267K/S364K/E357Q/H435R/Y436Y /K447del

SEQ ID NO: 477 - protein, 387 aa, synthetic construct
  source 1..387: note = XENP40195 Chain 2 - human_IL18_4CS_E31Q_D146Y_Fc(216)_IgG1_pI(-)_Isosteric_A_C2 20S/PVA_/S267K/L368D/K370S/K447del
YFGKLESKLSVIRNLNDQVLFIDQGNRPLFQDMTDSDSRDNAPRTIFIISMYKDSQPRGMAVTISVKSEKISTLSSENKIISFKEMNPPDNIKDTKSDIIFFQRSVPGHDNKMQFESSSYEGYFLASEKERDLFKLILKKEDELGYRSIMFTVQNEDEPKSSDKTHTCPPCPAPPVAGPSVFLFPPKPKDTLMISRTPEVTCVVVDVKHEDPEVKFNWYVDGVEVHNAKTKPREEEYNSTYRVVSVLTVLHQDWLNGKEYKCKVSNKALPAPIEKTISKAKGQPREPQVYTLPPSREEMTKNQVSLTCDVSGFYPSDIAVEWESDGQPENNYKTTPPVLDSDGSFFLYSKLTVDKSRWEQGDVFSCSVMHEALHNHYTQKSLSLSPG

SEQ ID NO: 478 - protein, 214 aa, synthetic construct; identical to SEQ ID NO: 295
  source 1..214: note = XENP40195 Chain 3 - SilentFv_L0 Light Chain

SEQ ID NO: 479 - protein, 444 aa, synthetic construct; identical to SEQ ID NO: 386
  source 1..444: note = XENP40196 Chain 1 - SilentFv_H0_Fc(216)_IgG1_PVA_/S267K/S364K/E357Q/H435R/Y436Y /K447del

SEQ ID NO: 480 - protein, 387 aa, synthetic construct
  source 1..387: note = XENP40196 Chain 2 - human_IL18_4CS_E31Q_D146L_Fc(216)_IgG1_pI(-)_Isosteric_A_C2 20S/PVA_/S267K/L368D/K370S/K447del
YFGKLESKLSVIRNLNDQVLFIDQGNRPLFQDMTDSDSRDNAPRTIFIISMYKDSQPRGMAVTISVKSEKISTLSSENKIISFKEMNPPDNIKDTKSDIIFFQRSVPGHDNKMQFESSSYEGYFLASEKERDLFKLILKKEDELGLRSIMFTVQNEDEPKSSDKTHTCPPCPAPPVAGPSVFLFPPKPKDTLMISRTPEVTCVVVDVKHEDPEVKFNWYVDGVEVHNAKTKPREEEYNSTYRVVSVLTVLHQDWLNGKEYKCKVSNKALPAPIEKTISKAKGQPREPQVYTLPPSREEMTKNQVSLTCDVSGFYPSDIAVEWESDGQPENNYKTTPPVLDSDGSFFLYSKLTVDKSRWEQGDVFSCSVMHEALHNHYTQKSLSLSPG

SEQ ID NO: 481 - protein, 214 aa, synthetic construct; identical to SEQ ID NO: 295
  source 1..214: note = XENP40196 Chain 3 - SilentFv_L0 Light Chain

SEQ ID NO: 482 - protein, 444 aa, synthetic construct; identical to SEQ ID NO: 386
  source 1..444: note = XENP40197 Chain 1 - SilentFv_H0_Fc(216)_IgG1_PVA_/S267K/S364K/E357Q/H435R/Y436Y /K447del

SEQ ID NO: 483 - protein, 387 aa, synthetic construct
  source 1..387: note = XENP40197 Chain 2 - human_IL18_4CS_E31Q_D146F_Fc(216)_IgG1_pI(-)_Isosteric_A_C2 20S/PVA_/S267K/L368D/K370S/K447del
YFGKLESKLSVIRNLNDQVLFIDQGNRPLFQDMTDSDSRDNAPRTIFIISMYKDSQPRGMAVTISVKSEKISTLSSENKIISFKEMNPPDNIKDTKSDIIFFQRSVPGHDNKMQFESSSYEGYFLASEKERDLFKLILKKEDELGFRSIMFTVQNEDEPKSSDKTHTCPPCPAPPVAGPSVFLFPPKPKDTLMISRTPEVTCVVVDVKHEDPEVKFNWYVDGVEVHNAKTKPREEEYNSTYRVVSVLTVLHQDWLNGKEYKCKVSNKALPAPIEKTISKAKGQPREPQVYTLPPSREEMTKNQVSLTCDVSGFYPSDIAVEWESDGQPENNYKTTPPVLDSDGSFFLYSKLTVDKSRWEQGDVFSCSVMHEALHNHYTQKSLSLSPG

SEQ ID NO: 484 - protein, 214 aa, synthetic construct; identical to SEQ ID NO: 295
  source 1..214: note = XENP40197 Chain 3 - SilentFv_L0 Light Chain

SEQ ID NO: 485 - protein, 444 aa, synthetic construct; identical to SEQ ID NO: 386
  source 1..444: note = XENP40198 Chain 1 - SilentFv_H0_Fc(216)_IgG1_PVA_/S267K/S364K/E357Q/H435R/Y436Y /K447del

SEQ ID NO: 486 - protein, 387 aa, synthetic construct
  source 1..387: note = XENP40198 Chain 2 - human_IL18_4CS_E31Q_Q103L_Fc(216)_IgG1_pI(-)_Isosteric_A_C2 20S/PVA_/S267K/L368D/K370S/K447del
YFGKLESKLSVIRNLNDQVLFIDQGNRPLFQDMTDSDSRDNAPRTIFIISMYKDSQPRGMAVTISVKSEKISTLSSENKIISFKEMNPPDNIKDTKSDIIFFLRSVPGHDNKMQFESSSYEGYFLASEKERDLFKLILKKEDELGDRSIMFTVQNEDEPKSSDKTHTCPPCPAPPVAGPSVFLFPPKPKDTLMISRTPEVTCVVVDVKHEDPEVKFNWYVDGVEVHNAKTKPREEEYNSTYRVVSVLTVLHQDWLNGKEYKCKVSNKALPAPIEKTISKAKGQPREPQVYTLPPSREEMTKNQVSLTCDVSGFYPSDIAVEWESDGQPENNYKTTPPVLDSDGSFFLYSKLTVDKSRWEQGDVFSCSVMHEALHNHYTQKSLSLSPG

SEQ ID NO: 487 - protein, 214 aa, synthetic construct; identical to SEQ ID NO: 295
  source 1..214: note = XENP40198 Chain 3 - SilentFv_L0 Light Chain

SEQ ID NO: 488 - protein, 444 aa, synthetic construct; identical to SEQ ID NO: 386
  source 1..444: note = XENP40199 Chain 1 - SilentFv_H0_Fc(216)_IgG1_PVA_/S267K/S364K/E357Q/H435R/Y436Y /K447del

SEQ ID NO: 489 - protein, 387 aa, synthetic construct
  source 1..387: note = XENP40199 Chain 2 - human_IL18_4CS_E31Q_Q103I_Fc(216)_IgG1_pI(-)_Isosteric_A_C2 20S/PVA_/S267K/L368D/K370S/K447del
YFGKLESKLSVIRNLNDQVLFIDQGNRPLFQDMTDSDSRDNAPRTIFIISMYKDSQPRGMAVTISVKSEKISTLSSENKIISFKEMNPPDNIKDTKSDIIFFIRSVPGHDNKMQFESSSYEGYFLASEKERDLFKLILKKEDELGDRSIMFTVQNEDEPKSSDKTHTCPPCPAPPVAGPSVFLFPPKPKDTLMISRTPEVTCVVVDVKHEDPEVKFNWYVDGVEVHNAKTKPREEEYNSTYRVVSVLTVLHQDWLNGKEYKCKVSNKALPAPIEKTISKAKGQPREPQVYTLPPSREEMTKNQVSLTCDVSGFYPSDIAVEWESDGQPENNYKTTPPVLDSDGSFFLYSKLTVDKSRWEQGDVFSCSVMHEALHNHYTQKSLSLSPG

SEQ ID NO: 490 - protein, 214 aa, synthetic construct; identical to SEQ ID NO: 295
  source 1..214: note = XENP40199 Chain 3 - SilentFv_L0 Light Chain

SEQ ID NO: 491 - protein, 444 aa, synthetic construct; identical to SEQ ID NO: 386
  source 1..444: note = XENP40200 Chain 1 - SilentFv_H0_Fc(216)_IgG1_PVA_/S267K/S364K/E357Q/H435R/Y436Y /K447del

SEQ ID NO: 492 - protein, 387 aa, synthetic construct
  source 1..387: note = XENP40200 Chain 2 - human_IL18_4CS_E31Q_M150F_Fc(216)_IgG1_pI(-)_Isosteric_A_C2 20S/PVA_/S267K/L368D/K370S/K447del
YFGKLESKLSVIRNLNDQVLFIDQGNRPLFQDMTDSDSRDNAPRTIFIISMYKDSQPRGMAVTISVKSEKISTLSSENKIISFKEMNPPDNIKDTKSDIIFFQRSVPGHDNKMQFESSSYEGYFLASEKERDLFKLILKKEDELGDRSIFFTVQNEDEPKSSDKTHTCPPCPAPPVAGPSVFLFPPKPKDTLMISRTPEVTCVVVDVKHEDPEVKFNWYVDGVEVHNAKTKPREEEYNSTYRVVSVLTVLHQDWLNGKEYKCKVSNKALPAPIEKTISKAKGQPREPQVYTLPPSREEMTKNQVSLTCDVSGFYPSDIAVEWESDGQPENNYKTTPPVLDSDGSFFLYSKLTVDKSRWEQGDVFSCSVMHEALHNHYTQKSLSLSPG

SEQ ID NO: 493 - protein, 214 aa, synthetic construct; identical to SEQ ID NO: 295
  source 1..214: note = XENP40200 Chain 3 - SilentFv_L0 Light Chain

SEQ ID NO: 494 - protein, 444 aa, synthetic construct; identical to SEQ ID NO: 386
  source 1..444: note = XENP40201 Chain 1 - SilentFv_H0_Fc(216)_IgG1_PVA_/S267K/S364K/E357Q/H435R/Y436Y /K447del

SEQ ID NO: 495 - protein, 387 aa, synthetic construct
  source 1..387: note = XENP40201 Chain 2 - human_IL18_4CS_Q18L_E31Q_Fc(216)_IgG1_pI(-)_Isosteric_A_C22 0S/PVA_/S267K/L368D/K370S/K447del
YFGKLESKLSVIRNLNDLVLFIDQGNRPLFQDMTDSDSRDNAPRTIFIISMYKDSQPRGMAVTISVKSEKISTLSSENKIISFKEMNPPDNIKDTKSDIIFFQRSVPGHDNKMQFESSSYEGYFLASEKERDLFKLILKKEDELGDRSIMFTVQNEDEPKSSDKTHTCPPCPAPPVAGPSVFLFPPKPKDTLMISRTPEVTCVVVDVKHEDPEVKFNWYVDGVEVHNAKTKPREEEYNSTYRVVSVLTVLHQDWLNGKEYKCKVSNKALPAPIEKTISKAKGQPREPQVYTLPPSREEMTKNQVSLTCDVSGFYPSDIAVEWESDGQPENNYKTTPPVLDSDGSFFLYSKLTVDKSRWEQGDVFSCSVMHEALHNHYTQKSLSLSPG

SEQ ID NO: 496 - protein, 214 aa, synthetic construct; identical to SEQ ID NO: 295
  source 1..214: note = XENP40201 Chain 3 - SilentFv_L0 Light Chain

SEQ ID NO: 497 - protein, 444 aa, synthetic construct; identical to SEQ ID NO: 386
  source 1..444: note = XENP40202 Chain 1 - SilentFv_H0_Fc(216)_IgG1_PVA_/S267K/S364K/E357Q/H435R/Y436Y /K447del

SEQ ID NO: 498 - protein, 387 aa, synthetic construct
  source 1..387: note = XENP40202 Chain 2 - human_IL18_3CS_E31Q_S68Y_Fc(216)_IgG1_pI(-)_Isosteric_A_C22 0S/PVA_/S267K/L368D/K370S/K447del
YFGKLESKLSVIRNLNDQVLFIDQGNRPLFQDMTDSDSRDNAPRTIFIISMYKDSQPRGMAVTISVKYEKISTLSSENKIISFKEMNPPDNIKDTKSDIIFFQRSVPGHDNKMQFESSSYEGYFLASEKERDLFKLILKKEDELGDRSIMFTVQNEDEPKSSDKTHTCPPCPAPPVAGPSVFLFPPKPKDTLMISRTPEVTCVVVDVKHEDPEVKFNWYVDGVEVHNAKTKPREEEYNSTYRVVSVLTVLHQDWLNGKEYKCKVSNKALPAPIEKTISKAKGQPREPQVYTLPPSREEMTKNQVSLTCDVSGFYPSDIAVEWESDGQPENNYKTTPPVLDSDGSFFLYSKLTVDKSRWEQGDVFSCSVMHEALHNHYTQKSLSLSPG

SEQ ID NO: 499 - protein, 214 aa, synthetic construct; identical to SEQ ID NO: 295
  source 1..214: note = XENP40202 Chain 3 - SilentFv_L0 Light Chain

SEQ ID NO: 500 - protein, 444 aa, synthetic construct; identical to SEQ ID NO: 386
  source 1..444: note = XENP40203 Chain 1 - SilentFv_H0_Fc(216)_IgG1_PVA_/S267K/S364K/E357Q/H435R/Y436Y /K447del

SEQ ID NO: 501 - protein, 387 aa, synthetic construct
  source 1..387: note = XENP40203 Chain 2 - human_IL18_3CS_E31Q_S38Q_Fc(216)_IgG1_pI(-)_Isosteric_A_C22 0S/PVA_/S267K/L368D/K370S/K447del
YFGKLESKLSVIRNLNDQVLFIDQGNRPLFQDMTDSDQRDNAPRTIFIISMYKDSQPRGMAVTISVKSEKISTLSSENKIISFKEMNPPDNIKDTKSDIIFFQRSVPGHDNKMQFESSSYEGYFLASEKERDLFKLILKKEDELGDRSIMFTVQNEDEPKSSDKTHTCPPCPAPPVAGPSVFLFPPKPKDTLMISRTPEVTCVVVDVKHEDPEVKFNWYVDGVEVHNAKTKPREEEYNSTYRVVSVLTVLHQDWLNGKEYKCKVSNKALPAPIEKTISKAKGQPREPQVYTLPPSREEMTKNQVSLTCDVSGFYPSDIAVEWESDGQPENNYKTTPPVLDSDGSFFLYSKLTVDKSRWEQGDVFSCSVMHEALHNHYTQKSLSLSPG

SEQ ID NO: 502 - protein, 214 aa, synthetic construct; identical to SEQ ID NO: 295
  source 1..214: note = XENP40203 Chain 3 - SilentFv_L0 Light Chain

SEQ ID NO: 503 - protein, 444 aa, synthetic construct; identical to SEQ ID NO: 386
  source 1..444: note = XENP40204 Chain 1 - SilentFv_H0_Fc(216)_IgG1_PVA_/S267K/S364K/E357Q/H435R/Y436Y /K447del

SEQ ID NO: 504 - protein, 387 aa, synthetic construct
  source 1..387: note = XENP40204 Chain 2 - human_IL18_3CS_E31Q_S38R_Fc(216)_IgG1_pI(-)_Isosteric_A_C22 0S/PVA_/S267K/L368D/K370S/K447del
YFGKLESKLSVIRNLNDQVLFIDQGNRPLFQDMTDSDRRDNAPRTIFIISMYKDSQPRGMAVTISVKSEKISTLSSENKIISFKEMNPPDNIKDTKSDIIFFQRSVPGHDNKMQFESSSYEGYFLASEKERDLFKLILKKEDELGDRSIMFTVQNEDEPKSSDKTHTCPPCPAPPVAGPSVFLFPPKPKDTLMISRTPEVTCVVVDVKHEDPEVKFNWYVDGVEVHNAKTKPREEEYNSTYRVVSVLTVLHQDWLNGKEYKCKVSNKALPAPIEKTISKAKGQPREPQVYTLPPSREEMTKNQVSLTCDVSGFYPSDIAVEWESDGQPENNYKTTPPVLDSDGSFFLYSKLTVDKSRWEQGDVFSCSVMHEALHNHYTQKSLSLSPG

SEQ ID NO: 505 - protein, 214 aa, synthetic construct; identical to SEQ ID NO: 295
  source 1..214: note = XENP40204 Chain 3 - SilentFv_L0 Light Chain

SEQ ID NO: 506 - protein, 444 aa, synthetic construct; identical to SEQ ID NO: 386
  source 1..444: note = XENP40205 Chain 1 - SilentFv_H0_Fc(216)_IgG1_PVA_/S267K/S364K/E357Q/H435R/Y436Y /K447del

SEQ ID NO: 507 - protein, 387 aa, synthetic construct
  source 1..387: note = XENP40205 Chain 2 - human_IL18_3CS_E31Q_S68D_Fc(216)_IgG1_pI(-)_Isosteric_A_C22 0S/PVA_/S267K/L368D/K370S/K447del
YFGKLESKLSVIRNLNDQVLFIDQGNRPLFQDMTDSDSRDNAPRTIFIISMYKDSQPRGMAVTISVKDEKISTLSSENKIISFKEMNPPDNIKDTKSDIIFFQRSVPGHDNKMQFESSSYEGYFLASEKERDLFKLILKKEDELGDRSIMFTVQNEDEPKSSDKTHTCPPCPAPPVAGPSVFLFPPKPKDTLMISRTPEVTCVVVDVKHEDPEVKFNWYVDGVEVHNAKTKPREEEYNSTYRVVSVLTVLHQDWLNGKEYKCKVSNKALPAPIEKTISKAKGQPREPQVYTLPPSREEMTKNQVSLTCDVSGFYPSDIAVEWESDGQPENNYKTTPPVLDSDGSFFLYSKLTVDKSRWEQGDVFSCSVMHEALHNHYTQKSLSLSPG

SEQ ID NO: 508 - protein, 214 aa, synthetic construct; identical to SEQ ID NO: 295
  source 1..214: note = XENP40205 Chain 3 - SilentFv_L0 Light Chain

SEQ ID NO: 509 - protein, 444 aa, synthetic construct; identical to SEQ ID NO: 386
  source 1..444: note = XENP40206 Chain 1 - SilentFv_H0_Fc(216)_IgG1_PVA_/S267K/S364K/E357Q/H435R/Y436Y /K447del

SEQ ID NO: 510 - protein, 387 aa, synthetic construct
  source 1..387: note = XENP40206 Chain 2 - human_IL18_4CS_S7P_E31Q_Fc(216)_IgG1_pI(-)_Isosteric_A_C220 S/PVA_/S267K/L368D/K370S/K447del
YFGKLEPKLSVIRNLNDQVLFIDQGNRPLFQDMTDSDSRDNAPRTIFIISMYKDSQPRGMAVTISVKSEKISTLSSENKIISFKEMNPPDNIKDTKSDIIFFQRSVPGHDNKMQFESSSYEGYFLASEKERDLFKLILKKEDELGDRSIMFTVQNEDEPKSSDKTHTCPPCPAPPVAGPSVFLFPPKPKDTLMISRTPEVTCVVVDVKHEDPEVKFNWYVDGVEVHNAKTKPREEEYNSTYRVVSVLTVLHQDWLNGKEYKCKVSNKALPAPIEKTISKAKGQPREPQVYTLPPSREEMTKNQVSLTCDVSGFYPSDIAVEWESDGQPENNYKTTPPVLDSDGSFFLYSKLTVDKSRWEQGDVFSCSVMHEALHNHYTQKSLSLSPG

SEQ ID NO: 511 - protein, 214 aa, synthetic construct; identical to SEQ ID NO: 295
  source 1..214: note = XENP40206 Chain 3 - SilentFv_L0 Light Chain

SEQ ID NO: 512 - protein, 444 aa, synthetic construct; identical to SEQ ID NO: 386
  source 1..444: note = XENP40207 Chain 1 - SilentFv_H0_Fc(216)_IgG1_PVA_/S267K/S364K/E357Q/H435R/Y436Y /K447del

SEQ ID NO: 513 - protein, 387 aa, synthetic construct
  source 1..387: note = XENP40207 Chain 2 - human_IL18_4CS_V11I_E31Q_Fc(216)_IgG1_pI(-)_Isosteric_A_C22 0S/PVA_/S267K/L368D/K370S/K447del
YFGKLESKLSIIRNLNDQVLFIDQGNRPLFQDMTDSDSRDNAPRTIFIISMYKDSQPRGMAVTISVKSEKISTLSSENKIISFKEMNPPDNIKDTKSDIIFFQRSVPGHDNKMQFESSSYEGYFLASEKERDLFKLILKKEDELGDRSIMFTVQNEDEPKSSDKTHTCPPCPAPPVAGPSVFLFPPKPKDTLMISRTPEVTCVVVDVKHEDPEVKFNWYVDGVEVHNAKTKPREEEYNSTYRVVSVLTVLHQDWLNGKEYKCKVSNKALPAPIEKTISKAKGQPREPQVYTLPPSREEMTKNQVSLTCDVSGFYPSDIAVEWESDGQPENNYKTTPPVLDSDGSFFLYSKLTVDKSRWEQGDVFSCSVMHEALHNHYTQKSLSLSPG

SEQ ID NO: 514 - protein, 214 aa, synthetic construct; identical to SEQ ID NO: 295
  source 1..214: note = XENP40207 Chain 3 - SilentFv_L0 Light Chain

SEQ ID NO: 515 - protein, 444 aa, synthetic construct; identical to SEQ ID NO: 386
  source 1..444: note = XENP40208 Chain 1 - SilentFv_H0_Fc(216)_IgG1_PVA_/S267K/S364K/E357Q/H435R/Y436Y /K447del

SEQ ID NO: 516 - protein, 387 aa, synthetic construct
  source 1..387: note = XENP40208 Chain 2 - human_IL18_4CS_D23N_E31Q_Fc(216)_IgG1_pI(-)_Isosteric_A_C22 0S/PVA_/S267K/L368D/K370S/K447del
YFGKLESKLSVIRNLNDQVLFINQGNRPLFQDMTDSDSRDNAPRTIFIISMYKDSQPRGMAVTISVKSEKISTLSSENKIISFKEMNPPDNIKDTKSDIIFFQRSVPGHDNKMQFESSSYEGYFLASEKERDLFKLILKKEDELGDRSIMFTVQNEDEPKSSDKTHTCPPCPAPPVAGPSVFLFPPKPKDTLMISRTPEVTCVVVDVKHEDPEVKFNWYVDGVEVHNAKTKPREEEYNSTYRVVSVLTVLHQDWLNGKEYKCKVSNKALPAPIEKTISKAKGQPREPQVYTLPPSREEMTKNQVSLTCDVSGFYPSDIAVEWESDGQPENNYKTTPPVLDSDGSFFLYSKLTVDKSRWEQGDVFSCSVMHEALHNHYTQKSLSLSPG

SEQ ID NO: 517 - protein, 214 aa, synthetic construct; identical to SEQ ID NO: 295
  source 1..214: note = XENP40208 Chain 3 - SilentFv_L0 Light Chain

SEQ ID NO: 518 - protein, 444 aa, synthetic construct; identical to SEQ ID NO: 386
  source 1..444: note = XENP40209 Chain 1 - SilentFv_H0_Fc(216)_IgG1_PVA_/S267K/S364K/E357Q/H435R/Y436Y /K447del

SEQ ID NO: 519 - protein, 387 aa, synthetic construct
  source 1..387: note = XENP40209 Chain 2 - human_IL18_4CS_D23S_E31Q_Fc(216)_IgG1_pI(-)_Isosteric_A_C22 0S/PVA_/S267K/L368D/K370S/K447del
YFGKLESKLSVIRNLNDQVLFISQGNRPLFQDMTDSDSRDNAPRTIFIISMYKDSQPRGMAVTISVKSEKISTLSSENKIISFKEMNPPDNIKDTKSDIIFFQRSVPGHDNKMQFESSSYEGYFLASEKERDLFKLILKKEDELGDRSIMFTVQNEDEPKSSDKTHTCPPCPAPPVAGPSVFLFPPKPKDTLMISRTPEVTCVVVDVKHEDPEVKFNWYVDGVEVHNAKTKPREEEYNSTYRVVSVLTVLHQDWLNGKEYKCKVSNKALPAPIEKTISKAKGQPREPQVYTLPPSREEMTKNQVSLTCDVSGFYPSDIAVEWESDGQPENNYKTTPPVLDSDGSFFLYSKLTVDKSRWEQGDVFSCSVMHEALHNHYTQKSLSLSPG

SEQ ID NO: 520 - protein, 214 aa, synthetic construct; identical to SEQ ID NO: 295
  source 1..214: note = XENP40209 Chain 3 - SilentFv_L0 Light Chain

SEQ ID NO: 521 - protein, 444 aa, synthetic construct; identical to SEQ ID NO: 386
  source 1..444: note = XENP40210 Chain 1 - SilentFv_H0_Fc(216)_IgG1_PVA_/S267K/S364K/E357Q/H435R/Y436Y /K447del

SEQ ID NO: 522 - protein, 387 aa, synthetic construct
  source 1..387: note = XENP40210 Chain 2 - human_IL18_4CS_R27Q_E31Q_Fc(216)_IgG1_pI(-)_Isosteric_A_C22 0S/PVA_/S267K/L368D/K370S/K447del
YFGKLESKLSVIRNLNDQVLFIDQGNQPLFQDMTDSDSRDNAPRTIFIISMYKDSQPRGMAVTISVKSEKISTLSSENKIISFKEMNPPDNIKDTKSDIIFFQRSVPGHDNKMQFESSSYEGYFLASEKERDLFKLILKKEDELGDRSIMFTVQNEDEPKSSDKTHTCPPCPAPPVAGPSVFLFPPKPKDTLMISRTPEVTCVVVDVKHEDPEVKFNWYVDGVEVHNAKTKPREEEYNSTYRVVSVLTVLHQDWLNGKEYKCKVSNKALPAPIEKTISKAKGQPREPQVYTLPPSREEMTKNQVSLTCDVSGFYPSDIAVEWESDGQPENNYKTTPPVLDSDGSFFLYSKLTVDKSRWEQGDVFSCSVMHEALHNHYTQKSLSLSPG

SEQ ID NO: 523 - protein, 214 aa, synthetic construct; identical to SEQ ID NO: 295
  source 1..214: note = XENP40210 Chain 3 - SilentFv_L0 Light Chain

SEQ ID NO: 524 - protein, 444 aa, synthetic construct; identical to SEQ ID NO: 386
  source 1..444: note = XENP40211 Chain 1 - SilentFv_H0_Fc(216)_IgG1_PVA_/S267K/S364K/E357Q/H435R/Y436Y /K447del

SEQ ID NO: 525 - protein, 387 aa, synthetic construct
  source 1..387: note = XENP40211 Chain 2 - human_IL18_4CS_L29V_E31Q_Fc(216)_IgG1_pI(-)_Isosteric_A_C22 0S/PVA_/S267K/L368D/K370S/K447del
YFGKLESKLSVIRNLNDQVLFIDQGNRPVFQDMTDSDSRDNAPRTIFIISMYKDSQPRGMAVTISVKSEKISTLSSENKIISFKEMNPPDNIKDTKSDIIFFQRSVPGHDNKMQFESSSYEGYFLASEKERDLFKLILKKEDELGDRSIMFTVQNEDEPKSSDKTHTCPPCPAPPVAGPSVFLFPPKPKDTLMISRTPEVTCVVVDVKHEDPEVKFNWYVDGVEVHNAKTKPREEEYNSTYRVVSVLTVLHQDWLNGKEYKCKVSNKALPAPIEKTISKAKGQPREPQVYTLPPSREEMTKNQVSLTCDVSGFYPSDIAVEWESDGQPENNYKTTPPVLDSDGSFFLYSKLTVDKSRWEQGDVFSCSVMHEALHNHYTQKSLSLSPG

SEQ ID NO: 526 - protein, 214 aa, synthetic construct; identical to SEQ ID NO: 295
  source 1..214: note = XENP40211 Chain 3 - SilentFv_L0 Light Chain

SEQ ID NO: 527 - protein, 444 aa, synthetic construct; identical to SEQ ID NO: 386
  source 1..444: note = XENP40212 Chain 1 - SilentFv_H0_Fc(216)_IgG1_PVA_/S267K/S364K/E357Q/H435R/Y436Y /K447del

SEQ ID NO: 528 - protein, 387 aa, synthetic construct
  source 1..387: note = XENP40212 Chain 2 - human_IL18_4CS_E31Q_T34P_Fc(216)_IgG1_pI(-)_Isosteric_A_C22 0S/PVA_/S267K/L368D/K370S/K447del
YFGKLESKLSVIRNLNDQVLFIDQGNRPLFQDMPDSDSRDNAPRTIFIISMYKDSQPRGMAVTISVKSEKISTLSSENKIISFKEMNPPDNIKDTKSDIIFFQRSVPGHDNKMQFESSSYEGYFLASEKERDLFKLILKKEDELGDRSIMFTVQNEDEPKSSDKTHTCPPCPAPPVAGPSVFLFPPKPKDTLMISRTPEVTCVVVDVKHEDPEVKFNWYVDGVEVHNAKTKPREEEYNSTYRVVSVLTVLHQDWLNGKEYKCKVSNKALPAPIEKTISKAKGQPREPQVYTLPPSREEMTKNQVSLTCDVSGFYPSDIAVEWESDGQPENNYKTTPPVLDSDGSFFLYSKLTVDKSRWEQGDVFSCSVMHEALHNHYTQKSLSLSPG

SEQ ID NO: 529 - protein, 214 aa, synthetic construct; identical to SEQ ID NO: 295
  source 1..214: note = XENP40212 Chain 3 - SilentFv_L0 Light Chain

SEQ ID NO: 530 - protein, 444 aa, synthetic construct; identical to SEQ ID NO: 386
  source 1..444: note = XENP40213 Chain 1 - SilentFv_H0_Fc(216)_IgG1_PVA_/S267K/S364K/E357Q/H435R/Y436Y /K447del

SEQ ID NO: 531 - protein, 387 aa, synthetic construct
  source 1..387: note = XENP40213 Chain 2 - human_IL18_4CS_E31Q_R39T_Fc(216)_IgG1_pI(-)_Isosteric_A_C22 0S/PVA_/S267K/L368D/K370S/K447del
YFGKLESKLSVIRNLNDQVLFIDQGNRPLFQDMTDSDSTDNAPRTIFIISMYKDSQPRGMAVTISVKSEKISTLSSENKIISFKEMNPPDNIKDTKSDIIFFQRSVPGHDNKMQFESSSYEGYFLASEKERDLFKLILKKEDELGDRSIMFTVQNEDEPKSSDKTHTCPPCPAPPVAGPSVFLFPPKPKDTLMISRTPEVTCVVVDVKHEDPEVKFNWYVDGVEVHNAKTKPREEEYNSTYRVVSVLTVLHQDWLNGKEYKCKVSNKALPAPIEKTISKAKGQPREPQVYTLPPSREEMTKNQVSLTCDVSGFYPSDIAVEWESDGQPENNYKTTPPVLDSDGSFFLYSKLTVDKSRWEQGDVFSCSVMHEALHNHYTQKSLSLSPG

SEQ ID NO: 532 - protein, 214 aa, synthetic construct; identical to SEQ ID NO: 295
  source 1..214: note = XENP40213 Chain 3 - SilentFv_L0 Light Chain

SEQ ID NO: 533 - protein, 444 aa, synthetic construct; identical to SEQ ID NO: 386
  source 1..444: note = XENP40214 Chain 1 - SilentFv_H0_Fc(216)_IgG1_PVA_/S267K/S364K/E357Q/H435R/Y436Y /K447del

SEQ ID NO: 534 - protein, 387 aa, synthetic construct
  source 1..387: note = XENP40214 Chain 2 - human_IL18_4CS_E31Q_R39S_Fc(216)_IgG1_pI(-)_Isosteric_A_C22 0S/PVA_/S267K/L368D/K370S/K447del
YFGKLESKLSVIRNLNDQVLFIDQGNRPLFQDMTDSDSSDNAPRTIFIISMYKDSQPRGMAVTISVKSEKISTLSSENKIISFKEMNPPDNIKDTKSDIIFFQRSVPGHDNKMQFESSSYEGYFLASEKERDLFKLILKKEDELGDRSIMFTVQNEDEPKSSDKTHTCPPCPAPPVAGPSVFLFPPKPKDTLMISRTPEVTCVVVDVKHEDPEVKFNWYVDGVEVHNAKTKPREEEYNSTYRVVSVLTVLHQDWLNGKEYKCKVSNKALPAPIEKTISKAKGQPREPQVYTLPPSREEMTKNQVSLTCDVSGFYPSDIAVEWESDGQPENNYKTTPPVLDSDGSFFLYSKLTVDKSRWEQGDVFSCSVMHEALHNHYTQKSLSLSPG

SEQ ID NO: 535 - protein, 214 aa, synthetic construct; identical to SEQ ID NO: 295
  source 1..214: note = XENP40214 Chain 3 - SilentFv_L0 Light Chain

SEQ ID NO: 536 - protein, 444 aa, synthetic construct; identical to SEQ ID NO: 386
  source 1..444: note = XENP40215 Chain 1 - SilentFv_H0_Fc(216)_IgG1_PVA_/S267K/S364K/E357Q/H435R/Y436Y /K447del

SEQ ID NO: 537 - protein, 387 aa, synthetic construct
  source 1..387: note = XENP40215 Chain 2 - human_IL18_4CS_E31Q_R44Q_Fc(216)_IgG1_pI(-)_Isosteric_A_C22 0S/PVA_/S267K/L368D/K370S/K447del
YFGKLESKLSVIRNLNDQVLFIDQGNRPLFQDMTDSDSRDNAPQTIFIISMYKDSQPRGMAVTISVKSEKISTLSSENKIISFKEMNPPDNIKDTKSDIIFFQRSVPGHDNKMQFESSSYEGYFLASEKERDLFKLILKKEDELGDRSIMFTVQNEDEPKSSDKTHTCPPCPAPPVAGPSVFLFPPKPKDTLMISRTPEVTCVVVDVKHEDPEVKFNWYVDGVEVHNAKTKPREEEYNSTYRVVSVLTVLHQDWLNGKEYKCKVSNKALPAPIEKTISKAKGQPREPQVYTLPPSREEMTKNQVSLTCDVSGFYPSDIAVEWESDGQPENNYKTTPPVLDSDGSFFLYSKLTVDKSRWEQGDVFSCSVMHEALHNHYTQKSLSLSPG

SEQ ID NO: 538 - protein, 214 aa, synthetic construct; identical to SEQ ID NO: 295
  source 1..214: note = XENP40215 Chain 3 - SilentFv_L0 Light Chain

SEQ ID NO: 539 - protein, 444 aa, synthetic construct; identical to SEQ ID NO: 386
  source 1..444: note = XENP40216 Chain 1 - SilentFv_H0_Fc(216)_IgG1_PVA_/S267K/S364K/E357Q/H435R/Y436Y /K447del

SEQ ID NO: 540 - protein, 387 aa, synthetic construct
  source 1..387: note = XENP40216 Chain 2 - human_IL18_4CS_E31Q_I46V_Fc(216)_IgG1_pI(-)_Isosteric_A_C22 0S/PVA_/S267K/L368D/K370S/K447del
YFGKLESKLSVIRNLNDQVLFIDQGNRPLFQDMTDSDSRDNAPRTVFIISMYKDSQPRGMAVTISVKSEKISTLSSENKIISFKEMNPPDNIKDTKSDIIFFQRSVPGHDNKMQFESSSYEGYFLASEKERDLFKLILKKEDELGDRSIMFTVQNEDEPKSSDKTHTCPPCPAPPVAGPSVFLFPPKPKDTLMISRTPEVTCVVVDVKHEDPEVKFNWYVDGVEVHNAKTKPREEEYNSTYRVVSVLTVLHQDWLNGKEYKCKVSNKALPAPIEKTISKAKGQPREPQVYTLPPSREEMTKNQVSLTCDVSGFYPSDIAVEWESDGQPENNYKTTPPVLDSDGSFFLYSKLTVDKSRWEQGDVFSCSVMHEALHNHYTQKSLSLSPG

SEQ ID NO: 541 - protein, 214 aa, synthetic construct; identical to SEQ ID NO: 295
  source 1..214: note = XENP40216 Chain 3 - SilentFv_L0 Light Chain

SEQ ID NO: 542 - protein, 444 aa, synthetic construct; identical to SEQ ID NO: 386
  source 1..444: note = XENP40217 Chain 1 - SilentFv_H0_Fc(216)_IgG1_PVA_/S267K/S364K/E357Q/H435R/Y436Y /K447del

SEQ ID NO: 543 - protein, 387 aa, synthetic construct
  source 1..387: note = XENP40217 Chain 2 - human_IL18_4CS_E31Q_S50Y_Fc(216)_IgG1_pI(-)_Isosteric_A_C22 0S/PVA_/S267K/L368D/K370S/K447del
YFGKLESKLSVIRNLNDQVLFIDQGNRPLFQDMTDSDSRDNAPRTIFIIYMYKDSQPRGMAVTISVKSEKISTLSSENKIISFKEMNPPDNIKDTKSDIIFFQRSVPGHDNKMQFESSSYEGYFLASEKERDLFKLILKKEDELGDRSIMFTVQNEDEPKSSDKTHTCPPCPAPPVAGPSVFLFPPKPKDTLMISRTPEVTCVVVDVKHEDPEVKFNWYVDGVEVHNAKTKPREEEYNSTYRVVSVLTVLHQDWLNGKEYKCKVSNKALPAPIEKTISKAKGQPREPQVYTLPPSREEMTKNQVSLTCDVSGFYPSDIAVEWESDGQPENNYKTTPPVLDSDGSFFLYSKLTVDKSRWEQGDVFSCSVMHEALHNHYTQKSLSLSPG

SEQ ID NO: 544 - protein, 214 aa, synthetic construct; identical to SEQ ID NO: 295
  source 1..214: note = XENP40217 Chain 3 - SilentFv_L0 Light Chain

SEQ ID NO: 545 - protein, 444 aa, synthetic construct; identical to SEQ ID NO: 386
  source 1..444: note = XENP40218 Chain 1 - SilentFv_H0_Fc(216)_IgG1_PVA_/S267K/S364K/E357Q/H435R/Y436Y /K447del

SEQ ID NO: 546 - protein, 387 aa, synthetic construct
  source 1..387: note = XENP40218 Chain 2 - human_IL18_4CS_E31Q_Q56L_Fc(216)_IgG1_pI(-)_Isosteric_A_C22 0S/PVA_/S267K/L368D/K370S/K447del
YFGKLESKLSVIRNLNDQVLFIDQGNRPLFQDMTDSDSRDNAPRTIFIISMYKDSLPRGMAVTISVKSEKISTLSSENKIISFKEMNPPDNIKDTKSDIIFFQRSVPGHDNKMQFESSSYEGYFLASEKERDLFKLILKKEDELGDRSIMFTVQNEDEPKSSDKTHTCPPCPAPPVAGPSVFLFPPKPKDTLMISRTPEVTCVVVDVKHEDPEVKFNWYVDGVEVHNAKTKPREEEYNSTYRVVSVLTVLHQDWLNGKEYKCKVSNKALPAPIEKTISKAKGQPREPQVYTLPPSREEMTKNQVSLTCDVSGFYPSDIAVEWESDGQPENNYKTTPPVLDSDGSFFLYSKLTVDKSRWEQGDVFSCSVMHEALHNHYTQKSLSLSPG

SEQ ID NO: 547 - protein, 214 aa, synthetic construct; identical to SEQ ID NO: 295
  source 1..214: note = XENP40218 Chain 3 - SilentFv_L0 Light Chain

SEQ ID NO: 548 - protein, 444 aa, synthetic construct; identical to SEQ ID NO: 386
  source 1..444: note = XENP40219 Chain 1 - SilentFv_H0_Fc(216)_IgG1_PVA_/S267K/S364K/E357Q/H435R/Y436Y /K447del

SEQ ID NO: 549 - protein, 387 aa, synthetic construct
  source 1..387: note = XENP40219 Chain 2 - human_IL18_4CS_E31Q_Q56L_P57T_Fc(216)_IgG1_pI(-)_Isosteric_ A_C220S/PVA_/S267K/L368D/K370S/K447del
YFGKLESKLSVIRNLNDQVLFIDQGNRPLFQDMTDSDSRDNAPRTIFIISMYKDSLTRGMAVTISVKSEKISTLSSENKIISFKEMNPPDNIKDTKSDIIFFQRSVPGHDNKMQFESSSYEGYFLASEKERDLFKLILKKEDELGDRSIMFTVQNEDEPKSSDKTHTCPPCPAPPVAGPSVFLFPPKPKDTLMISRTPEVTCVVVDVKHEDPEVKFNWYVDGVEVHNAKTKPREEEYNSTYRVVSVLTVLHQDWLNGKEYKCKVSNKALPAPIEKTISKAKGQPREPQVYTLPPSREEMTKNQVSLTCDVSGFYPSDIAVEWESDGQPENNYKTTPPVLDSDGSFFLYSKLTVDKSRWEQGDVFSCSVMHEALHNHYTQKSLSLSPG

SEQ ID NO: 550 - protein, 214 aa, synthetic construct; identical to SEQ ID NO: 295
  source 1..214: note = XENP40219 Chain 3 - SilentFv_L0 Light Chain

SEQ ID NO: 551 - protein, 444 aa, synthetic construct; identical to SEQ ID NO: 386
  source 1..444: note = XENP40220 Chain 1 - SilentFv_H0_Fc(216)_IgG1_PVA_/S267K/S364K/E357Q/H435R/Y436Y /K447del

SEQ ID NO: 552 - protein, 387 aa, synthetic construct
  source 1..387: note = XENP40220 Chain 2 - human_IL18_4CS_E31Q_P57T_Fc(216)_IgG1_pI(-)_Isosteric_A_C22 0S/PVA_/S267K/L368D/K370S/K447del
YFGKLESKLSVIRNLNDQVLFIDQGNRPLFQDMTDSDSRDNAPRTIFIISMYKDSQTRGMAVTISVKSEKISTLSSENKIISFKEMNPPDNIKDTKSDIIFFQRSVPGHDNKMQFESSSYEGYFLASEKERDLFKLILKKEDELGDRSIMFTVQNEDEPKSSDKTHTCPPCPAPPVAGPSVFLFPPKPKDTLMISRTPEVTCVVVDVKHEDPEVKFNWYVDGVEVHNAKTKPREEEYNSTYRVVSVLTVLHQDWLNGKEYKCKVSNKALPAPIEKTISKAKGQPREPQVYTLPPSREEMTKNQVSLTCDVSGFYPSDIAVEWESDGQPENNYKTTPPVLDSDGSFFLYSKLTVDKSRWEQGDVFSCSVMHEALHNHYTQKSLSLSPG

SEQ ID NO: 553 - protein, 214 aa, synthetic construct; identical to SEQ ID NO: 295
  source 1..214: note = XENP40220 Chain 3 - SilentFv_L0 Light Chain

SEQ ID NO: 554 - protein, 444 aa, synthetic construct; identical to SEQ ID NO: 386
  source 1..444: note = XENP40221 Chain 1 - SilentFv_H0_Fc(216)_IgG1_PVA_/S267K/S364K/E357Q/H435R/Y436Y /K447del

SEQ ID NO: 555 - protein, 387 aa, synthetic construct
  source 1..387: note = XENP40221 Chain 2 - human_IL18_4CS_E31Q_P57V_Fc(216)_IgG1_pI(-)_Isosteric_A_C22 0S/PVA_/S267K/L368D/K370S/K447del
YFGKLESKLSVIRNLNDQVLFIDQGNRPLFQDMTDSDSRDNAPRTIFIISMYKDSQVRGMAVTISVKSEKISTLSSENKIISFKEMNPPDNIKDTKSDIIFFQRSVPGHDNKMQFESSSYEGYFLASEKERDLFKLILKKEDELGDRSIMFTVQNEDEPKSSDKTHTCPPCPAPPVAGPSVFLFPPKPKDTLMISRTPEVTCVVVDVKHEDPEVKFNWYVDGVEVHNAKTKPREEEYNSTYRVVSVLTVLHQDWLNGKEYKCKVSNKALPAPIEKTISKAKGQPREPQVYTLPPSREEMTKNQVSLTCDVSGFYPSDIAVEWESDGQPENNYKTTPPVLDSDGSFFLYSKLTVDKSRWEQGDVFSCSVMHEALHNHYTQKSLSLSPG

SEQ ID NO: 556 - protein, 214 aa, synthetic construct; identical to SEQ ID NO: 295
  source 1..214: note = XENP40221 Chain 3 - SilentFv_L0 Light Chain

SEQ ID NO: 557 - protein, 444 aa, synthetic construct; identical to SEQ ID NO: 386
  source 1..444: note = XENP40222 Chain 1 - SilentFv_H0_Fc(216)_IgG1_PVA_/S267K/S364K/E357Q/H435R/Y436Y /K447del

SEQ ID NO: 558 - protein, 387 aa, synthetic construct
  source 1..387: note = XENP40222 Chain 2 - human_IL18_4CS_E31Q_M60L_Fc(216)_IgG1_pI(-)_Isosteric_A_C22 0S/PVA_/S267K/L368D/K370S/K447del
YFGKLESKLSVIRNLNDQVLFIDQGNRPLFQDMTDSDSRDNAPRTIFIISMYKDSQPRGLAVTISVKSEKISTLSSENKIISFKEMNPPDNIKDTKSDIIFFQRSVPGHDNKMQFESSSYEGYFLASEKERDLFKLILKKEDELGDRSIMFTVQNEDEPKSSDKTHTCPPCPAPPVAGPSVFLFPPKPKDTLMISRTPEVTCVVVDVKHEDPEVKFNWYVDGVEVHNAKTKPREEEYNSTYRVVSVLTVLHQDWLNGKEYKCKVSNKALPAPIEKTISKAKGQPREPQVYTLPPSREEMTKNQVSLTCDVSGFYPSDIAVEWESDGQPENNYKTTPPVLDSDGSFFLYSKLTVDKSRWEQGDVFSCSVMHEALHNHYTQKSLSLSPG

SEQ ID NO: 559 - protein, 214 aa, synthetic construct; identical to SEQ ID NO: 295
  source 1..214: note = XENP40222 Chain 3 - SilentFv_L0 Light Chain

SEQ ID NO: 560 - protein, 444 aa, synthetic construct; identical to SEQ ID NO: 386
  source 1..444: note = XENP40223 Chain 1 - SilentFv_H0_Fc(216)_IgG1_PVA_/S267K/S364K/E357Q/H435R/Y436Y /K447del

SEQ ID NO: 561 - protein, 387 aa, synthetic construct
  source 1..387: note = XENP40223 Chain 2 - human_IL18_4CS_E31Q_K67Q_Fc(216)_IgG1_pI(-)_Isosteric_A_C22 0S/PVA_/S267K/L368D/K370S/K447del
YFGKLESKLSVIRNLNDQVLFIDQGNRPLFQDMTDSDSRDNAPRTIFIISMYKDSQPRGMAVTISVQSEKISTLSSENKIISFKEMNPPDNIKDTKSDIIFFQRSVPGHDNKMQFESSSYEGYFLASEKERDLFKLILKKEDELGDRSIMFTVQNEDEPKSSDKTHTCPPCPAPPVAGPSVFLFPPKPKDTLMISRTPEVTCVVVDVKHEDPEVKFNWYVDGVEVHNAKTKPREEEYNSTYRVVSVLTVLHQDWLNGKEYKCKVSNKALPAPIEKTISKAKGQPREPQVYTLPPSREEMTKNQVSLTCDVSGFYPSDIAVEWESDGQPENNYKTTPPVLDSDGSFFLYSKLTVDKSRWEQGDVFSCSVMHEALHNHYTQKSLSLSPG

SEQ ID NO: 562 - protein, 214 aa, synthetic construct; identical to SEQ ID NO: 295
  source 1..214: note = XENP40223 Chain 3 - SilentFv_L0 Light Chain

SEQ ID NO: 563 - protein, 444 aa, synthetic construct; identical to SEQ ID NO: 386
  source 1..444: note = XENP40224 Chain 1 - SilentFv_H0_Fc(216)_IgG1_PVA_/S267K/S364K/E357Q/H435R/Y436Y /K447del

SEQ ID NO: 564 - protein, 387 aa, synthetic construct
  source 1..387: note = XENP40224 Chain 2 - human_IL18_4CS_E31Q_E69K_Fc(216)_IgG1_pI(-)_Isosteric_A_C22 0S/PVA_/S267K/L368D/K370S/K447del
YFGKLESKLSVIRNLNDQVLFIDQGNRPLFQDMTDSDSRDNAPRTIFIISMYKDSQPRGMAVTISVKSKKISTLSSENKIISFKEMNPPDNIKDTKSDIIFFQRSVPGHDNKMQFESSSYEGYFLASEKERDLFKLILKKEDELGDRSIMFTVQNEDEPKSSDKTHTCPPCPAPPVAGPSVFLFPPKPKDTLMISRTPEVTCVVVDVKHEDPEVKFNWYVDGVEVHNAKTKPREEEYNSTYRVVSVLTVLHQDWLNGKEYKCKVSNKALPAPIEKTISKAKGQPREPQVYTLPPSREEMTKNQVSLTCDVSGFYPSDIAVEWESDGQPENNYKTTPPVLDSDGSFFLYSKLTVDKSRWEQGDVFSCSVMHEALHNHYTQKSLSLSPG

SEQ ID NO: 565 - protein, 214 aa, synthetic construct; identical to SEQ ID NO: 295
  source 1..214: note = XENP40224 Chain 3 - SilentFv_L0 Light Chain

SEQ ID NO: 566 - protein, 444 aa, synthetic construct; identical to SEQ ID NO: 386
  source 1..444: note = XENP40225 Chain 1 - SilentFv_H0_Fc(216)_IgG1_PVA_/S267K/S364K/E357Q/H435R/Y436Y /K447del

SEQ ID NO: 567 - protein, 387 aa, synthetic construct
  source 1..387: note = XENP40225 Chain 2 - human_IL18_4CS_E31Q_I71M_Fc(216)_IgG1_pI(-)_Isosteric_A_C22 0S/PVA_/S267K/L368D/K370S/K447del
YFGKLESKLSVIRNLNDQVLFIDQGNRPLFQDMTDSDSRDNAPRTIFIISMYKDSQPRGMAVTISVKSEKMSTLSSENKIISFKEMNPPDNIKDTKSDIIFFQRSVPGHDNKMQFESSSYEGYFLASEKERDLFKLILKKEDELGDRSIMFTVQNEDEPKSSDKTHTCPPCPAPPVAGPSVFLFPPKPKDTLMISRTPEVTCVVVDVKHEDPEVKFNWYVDGVEVHNAKTKPREEEYNSTYRVVSVLTVLHQDWLNGKEYKCKVSNKALPAPIEKTISKAKGQPREPQVYTLPPSREEMTKNQVSLTCDVSGFYPSDIAVEWESDGQPENNYKTTPPVLDSDGSFFLYSKLTVDKSRWEQGDVFSCSVMHEALHNHYTQKSLSLSPG

SEQ ID NO: 568 - protein, 214 aa, synthetic construct; identical to SEQ ID NO: 295
  source 1..214: note = XENP40225 Chain 3 - SilentFv_L0 Light Chain

SEQ ID NO: 569 - protein, 444 aa, synthetic construct; identical to SEQ ID NO: 386
  source 1..444: note = XENP40226 Chain 1 - SilentFv_H0_Fc(216)_IgG1_PVA_/S267K/S364K/E357Q/H435R/Y436Y /K447del

SEQ ID NO: 570 - protein, 387 aa, synthetic construct
  source 1..387: note = XENP40226 Chain 2 - human_IL18_4CS_E31Q_E77K_Fc(216)_IgG1_pI(-)_Isosteric_A_C22 0S/PVA_/S267K/L368D/K370S/K447del
YFGKLESKLSVIRNLNDQVLFIDQGNRPLFQDMTDSDSRDNAPRTIFIISMYKDSQPRGMAVTISVKSEKISTLSSKNKIISFKEMNPPDNIKDTKSDIIFFQRSVPGHDNKMQFESSSYEGYFLASEKERDLFKLILKKEDELGDRSIMFTVQNEDEPKSSDKTHTCPPCPAPPVAGPSVFLFPPKPKDTLMISRTPEVTCVVVDVKHEDPEVKFNWYVDGVEVHNAKTKPREEEYNSTYRVVSVLTVLHQDWLNGKEYKCKVSNKALPAPIEKTISKAKGQPREPQVYTLPPSREEMTKNQVSLTCDVSGFYPSDIAVEWESDGQPENNYKTTPPVLDSDGSFFLYSKLTVDKSRWEQGDVFSCSVMHEALHNHYTQKSLSLSPG

SEQ ID NO: 571 - protein, 214 aa, synthetic construct; identical to SEQ ID NO: 295
  source 1..214: note = XENP40226 Chain 3 - SilentFv_L0 Light Chain

SEQ ID NO: 572 - protein, 444 aa, synthetic construct; identical to SEQ ID NO: 386
  source 1..444: note = XENP40227 Chain 1 - SilentFv_H0_Fc(216)_IgG1_PVA_/S267K/S364K/E357Q/H435R/Y436Y /K447del

SEQ ID NO: 573 - protein, 387 aa, synthetic construct
  source 1..387: note = XENP40227 Chain 2 - human_IL18_4CS_E31Q_I80T_Fc(216)_IgG1_pI(-)_Isosteric_A_C22 0S/PVA_/S267K/L368D/K370S/K447del
YFGKLESKLSVIRNLNDQVLFIDQGNRPLFQDMTDSDSRDNAPRTIFIISMYKDSQPRGMAVTISVKSEKISTLSSENKTISFKEMNPPDNIKDTKSDIIFFQRSVPGHDNKMQFESSSYEGYFLASEKERDLFKLILKKEDELGDRSIMFTVQNEDEPKSSDKTHTCPPCPAPPVAGPSVFLFPPKPKDTLMISRTPEVTCVVVDVKHEDPEVKFNWYVDGVEVHNAKTKPREEEYNSTYRVVSVLTVLHQDWLNGKEYKCKVSNKALPAPIEKTISKAKGQPREPQVYTLPPSREEMTKNQVSLTCDVSGFYPSDIAVEWESDGQPENNYKTTPPVLDSDGSFFLYSKLTVDKSRWEQGDVFSCSVMHEALHNHYTQKSLSLSPG

SEQ ID NO: 574 - protein, 214 aa, synthetic construct; identical to SEQ ID NO: 295
  source 1..214: note = XENP40227 Chain 3 - SilentFv_L0 Light Chain

SEQ ID NO: 575 - protein, 444 aa, synthetic construct; identical to SEQ ID NO: 386
  source 1..444: note = XENP40228 Chain 1 - SilentFv_H0_Fc(216)_IgG1_PVA_/S267K/S364K/E357Q/H435R/Y436Y /K447del

SEQ ID NO: 576 - protein, 387 aa, synthetic construct
  source 1..387: note = XENP40228 Chain 2 - human_IL18_4CS_E31Q_I81V_Fc(216)_IgG1_pI(-)_Isosteric_A_C22 0S/PVA_/S267K/L368D/K370S/K447del
YFGKLESKLSVIRNLNDQVLFIDQGNRPLFQDMTDSDSRDNAPRTIFIISMYKDSQPRGMAVTISVKSEKISTLSSENKIVSFKEMNPPDNIKDTKSDIIFFQRSVPGHDNKMQFESSSYEGYFLASEKERDLFKLILKKEDELGDRSIMFTVQNEDEPKSSDKTHTCPPCPAPPVAGPSVFLFPPKPKDTLMISRTPEVTCVVVDVKHEDPEVKFNWYVDGVEVHNAKTKPREEEYNSTYRVVSVLTVLHQDWLNGKEYKCKVSNKALPAPIEKTISKAKGQPREPQVYTLPPSREEMTKNQVSLTCDVSGFYPSDIAVEWESDGQPENNYKTTPPVLDSDGSFFLYSKLTVDKSRWEQGDVFSCSVMHEALHNHYTQKSLSLSPG

SEQ ID NO: 577 - protein, 214 aa, synthetic construct; identical to SEQ ID NO: 295
  source 1..214: note = XENP40228 Chain 3 - SilentFv_L0 Light Chain

SEQ ID NO: 578 - protein, 444 aa, synthetic construct; identical to SEQ ID NO: 386
  source 1..444: note = XENP40229 Chain 1 - SilentFv_H0_Fc(216)_IgG1_PVA_/S267K/S364K/E357Q/H435R/Y436Y /K447del

SEQ ID NO: 579 - protein, 387 aa, synthetic construct
  source 1..387: note = XENP40229 Chain 2 - human_IL18_4CS_E31Q_I81L_Fc(216)_IgG1_pI(-)_Isosteric_A_C22 0S/PVA_/S267K/L368D/K370S/K447del
YFGKLESKLSVIRNLNDQVLFIDQGNRPLFQDMTDSDSRDNAPRTIFIISMYKDSQPRGMAVTISVKSEKISTLSSENKILSFKEMNPPDNIKDTKSDIIFFQRSVPGHDNKMQFESSSYEGYFLASEKERDLFKLILKKEDELGDRSIMFTVQNEDEPKSSDKTHTCPPCPAPPVAGPSVFLFPPKPKDTLMISRTPEVTCVVVDVKHEDPEVKFNWYVDGVEVHNAKTKPREEEYNSTYRVVSVLTVLHQDWLNGKEYKCKVSNKALPAPIEKTISKAKGQPREPQVYTLPPSREEMTKNQVSLTCDVSGFYPSDIAVEWESDGQPENNYKTTPPVLDSDGSFFLYSKLTVDKSRWEQGDVFSCSVMHEALHNHYTQKSLSLSPG

SEQ ID NO: 580 - protein, 214 aa, synthetic construct; identical to SEQ ID NO: 295
  source 1..214: note = XENP40229 Chain 3 - SilentFv_L0 Light Chain

SEQ ID NO: 581 - protein, 444 aa, synthetic construct; identical to SEQ ID NO: 386
  source 1..444: note = XENP40230 Chain 1 - SilentFv_H0_Fc(216)_IgG1_PVA_/S267K/S364K/E357Q/H435R/Y436Y /K447del

SEQ ID NO: 582 - protein, 387 aa, synthetic construct
  source 1..387: note = XENP40230 Chain 2 - human_IL18_4CS_E31Q_N87S_Fc(216)_IgG1_pI(-)_Isosteric_A_C22 0S/PVA_/S267K/L368D/K370S/K447del
YFGKLESKLSVIRNLNDQVLFIDQGNRPLFQDMTDSDSRDNAPRTIFIISMYKDSQPRGMAVTISVKSEKISTLSSENKIISFKEMSPPDNIKDTKSDIIFFQRSVPGHDNKMQFESSSYEGYFLASEKERDLFKLILKKEDELGDRSIMFTVQNEDEPKSSDKTHTCPPCPAPPVAGPSVFLFPPKPKDTLMISRTPEVTCVVVDVKHEDPEVKFNWYVDGVEVHNAKTKPREEEYNSTYRVVSVLTVLHQDWLNGKEYKCKVSNKALPAPIEKTISKAKGQPREPQVYTLPPSREEMTKNQVSLTCDVSGFYPSDIAVEWESDGQPENNYKTTPPVLDSDGSFFLYSKLTVDKSRWEQGDVFSCSVMHEALHNHYTQKSLSLSPG

SEQ ID NO: 583 - protein, 214 aa, synthetic construct; identical to SEQ ID NO: 295
  source 1..214: note = XENP40230 Chain 3 - SilentFv_L0 Light Chain

SEQ ID NO: 584 - protein, 444 aa, synthetic construct; identical to SEQ ID NO: 386
  source 1..444: note = XENP40231 Chain 1 - SilentFv_H0_Fc(216)_IgG1_PVA_/S267K/S364K/E357Q/H435R/Y436Y /K447del

SEQ ID NO: 585 - protein, 387 aa, synthetic construct
  source 1..387: note = XENP40231 Chain 2 - human_IL18_4CS_E31Q_D90E_Fc(216)_IgG1_pI(-)_Isosteric_A_C22 0S/PVA_/S267K/L368D/K370S/K447del
YFGKLESKLSVIRNLNDQVLFIDQGNRPLFQDMTDSDSRDNAPRTIFIISMYKDSQPRGMAVTISVKSEKISTLSSENKIISFKEMNPPENIKDTKSDIIFFQRSVPGHDNKMQFESSSYEGYFLASEKERDLFKLILKKEDELGDRSIMFTVQNEDEPKSSDKTHTCPPCPAPPVAGPSVFLFPPKPKDTLMISRTPEVTCVVVDVKHEDPEVKFNWYVDGVEVHNAKTKPREEEYNSTYRVVSVLTVLHQDWLNGKEYKCKVSNKALPAPIEKTISKAKGQPREPQVYTLPPSREEMTKNQVSLTCDVSGFYPSDIAVEWESDGQPENNYKTTPPVLDSDGSFFLYSKLTVDKSRWEQGDVFSCSVMHEALHNHYTQKSLSLSPG

SEQ ID NO: 586 - protein, 214 aa, synthetic construct; identical to SEQ ID NO: 295
  source 1..214: note = XENP40231 Chain 3 - SilentFv_L0 Light Chain

SEQ ID NO: 587 - protein, 444 aa, synthetic construct; identical to SEQ ID NO: 386
  source 1..444: note = XENP40232 Chain 1 - SilentFv_H0_Fc(216)_IgG1_PVA_/S267K/S364K/E357Q/H435R/Y436Y /K447del

SEQ ID NO: 588 - protein, 387 aa, synthetic construct
  source 1..387: note = XENP40232 Chain 2 - human_IL18_4CS_E31Q_K93D_T95E_Fc(216)_IgG1_pI(-)_Isosteric_ A_C220S/PVA_/S267K/L368D/K370S/K447del
YFGKLESKLSVIRNLNDQVLFIDQGNRPLFQDMTDSDSRDNAPRTIFIISMYKDSQPRGMAVTISVKSEKISTLSSENKIISFKEMNPPDNIDDEKSDIIFFQRSVPGHDNKMQFESSSYEGYFLASEKERDLFKLILKKEDELGDRSIMFTVQNEDEPKSSDKTHTCPPCPAPPVAGPSVFLFPPKPKDTLMISRTPEVTCVVVDVKHEDPEVKFNWYVDGVEVHNAKTKPREEEYNSTYRVVSVLTVLHQDWLNGKEYKCKVSNKALPAPIEKTISKAKGQPREPQVYTLPPSREEMTKNQVSLTCDVSGFYPSDIAVEWESDGQPENNYKTTPPVLDSDGSFFLYSKLTVDKSRWEQGDVFSCSVMHEALHNHYTQKSLSLSPG

SEQ ID NO: 589 - protein, 214 aa, synthetic construct; identical to SEQ ID NO: 295
  source 1..214: note = XENP40232 Chain 3 - SilentFv_L0 Light Chain

SEQ ID NO: 590 - protein, 444 aa, synthetic construct; identical to SEQ ID NO: 386
  source 1..444: note = XENP40233 Chain 1 - SilentFv_H0_Fc(216)_IgG1_PVA_/S267K/S364K/E357Q/H435R/Y436Y /K447del

SEQ ID NO: 591 - protein, 387 aa, synthetic construct
  source 1..387: note = XENP40233 Chain 2 - human_IL18_4CS_E31Q_K93N_T95E_Fc(216)_IgG1_pI(-)_Isosteric_ A_C220S/PVA_/S267K/L368D/K370S/K447del
YFGKLESKLSVIRNLNDQVLFIDQGNRPLFQDMTDSDSRDNAPRTIFIISMYKDSQPRGMAVTISVKSEKISTLSSENKIISFKEMNPPDNINDEKSDIIFFQRSVPGHDNKMQFESSSYEGYFLASEKERDLFKLILKKEDELGDRSIMFTVQNEDEPKSSDKTHTCPPCPAPPVAGPSVFLFPPKPKDTLMISRTPEVTCVVVDVKHEDPEVKFNWYVDGVEVHNAKTKPREEEYNSTYRVVSVLTVLHQDWLNGKEYKCKVSNKALPAPIEKTISKAKGQPREPQVYTLPPSREEMTKNQVSLTCDVSGFYPSDIAVEWESDGQPENNYKTTPPVLDSDGSFFLYSKLTVDKSRWEQGDVFSCSVMHEALHNHYTQKSLSLSPG

SEQ ID NO: 592 - protein, 214 aa, synthetic construct; identical to SEQ ID NO: 295
  source 1..214: note = XENP40233 Chain 3 - SilentFv_L0 Light Chain

SEQ ID NO: 593 - protein, 444 aa, synthetic construct; identical to SEQ ID NO: 386
  source 1..444: note = XENP40234 Chain 1 - SilentFv_H0_Fc(216)_IgG1_PVA_/S267K/S364K/E357Q/H435R/Y436Y /K447del

SEQ ID NO: 594 - protein, 387 aa, synthetic construct
  source 1..387: note = XENP40234 Chain 2 - human_IL18_4CS_E31Q_T95E_Fc(216)_IgG1_pI(-)_Isosteric_A_C22 0S/PVA_/S267K/L368D/K370S/K447del
YFGKLESKLSVIRNLNDQVLFIDQGNRPLFQDMTDSDSRDNAPRTIFIISMYKDSQPRGMAVTISVKSEKISTLSSENKIISFKEMNPPDNIKDEKSDIIFFQRSVPGHDNKMQFESSSYEGYFLASEKERDLFKLILKKEDELGDRSIMFTVQNEDEPKSSDKTHTCPPCPAPPVAGPSVFLFPPKPKDTLMISRTPEVTCVVVDVKHEDPEVKFNWYVDGVEVHNAKTKPREEEYNSTYRVVSVLTVLHQDWLNGKEYKCKVSNKALPAPIEKTISKAKGQPREPQVYTLPPSREEMTKNQVSLTCDVSGFYPSDIAVEWESDGQPENNYKTTPPVLDSDGSFFLYSKLTVDKSRWEQGDVFSCSVMHEALHNHYTQKSLSLSPG

SEQ ID NO: 595 - protein, 214 aa, synthetic construct; identical to SEQ ID NO: 295
  source 1..214: note = XENP40234 Chain 3 - SilentFv_L0 Light Chain

SEQ ID NO: 596 - protein, 444 aa, synthetic construct; identical to SEQ ID NO: 386
  source 1..444: note = XENP40235 Chain 1 - SilentFv_H0_Fc(216)_IgG1_PVA_/S267K/S364K/E357Q/H435R/Y436Y /K447del

SEQ ID NO: 597 - protein, 387 aa, synthetic construct
  source 1..387: note = XENP40235 Chain 2 - human_IL18_4CS_E31Q_K96G_Fc(216)_IgG1_pI(-)_Isosteric_A_C22 0S/PVA_/S267K/L368D/K370S/K447del
YFGKLESKLSVIRNLNDQVLFIDQGNRPLFQDMTDSDSRDNAPRTIFIISMYKDSQPRGMAVTISVKSEKISTLSSENKIISFKEMNPPDNIKDTGSDIIFFQRSVPGHDNKMQFESSSYEGYFLASEKERDLFKLILKKEDELGDRSIMFTVQNEDEPKSSDKTHTCPPCPAPPVAGPSVFLFPPKPKDTLMISRTPEVTCVVVDVKHEDPEVKFNWYVDGVEVHNAKTKPREEEYNSTYRVVSVLTVLHQDWLNGKEYKCKVSNKALPAPIEKTISKAKGQPREPQVYTLPPSREEMTKNQVSLTCDVSGFYPSDIAVEWESDGQPENNYKTTPPVLDSDGSFFLYSKLTVDKSRWEQGDVFSCSVMHEALHNHYTQKSLSLSPG

SEQ ID NO: 598 - protein, 214 aa, synthetic construct; identical to SEQ ID NO: 295
  source 1..214: note = XENP40235 Chain 3 - SilentFv_L0 Light Chain

SEQ ID NO: 599 - protein, 444 aa, synthetic construct; identical to SEQ ID NO: 386
  source 1..444: note = XENP40236 Chain 1 - SilentFv_H0_Fc(216)_IgG1_PVA_/S267K/S364K/E357Q/H435R/Y436Y /K447del

SEQ ID NO: 600 - protein, 387 aa, synthetic construct
  source 1..387: note = XENP40236 Chain 2 - human_IL18_4CS_E31Q_S97N_Fc(216)_IgG1_pI(-)_Isosteric_A_C22 0S/PVA_/S267K/L368D/K370S/K447del
YFGKLESKLSVIRNLNDQVLFIDQGNRPLFQDMTDSDSRDNAPRTIFIISMYKDSQPRGMAVTISVKSEKISTLSSENKIISFKEMNPPDNIKDTKNDIIFFQRSVPGHDNKMQFESSSYEGYFLASEKERDLFKLILKKEDELGDRSIMFTVQNEDEPKSSDKTHTCPPCPAPPVAGPSVFLFPPKPKDTLMISRTPEVTCVVVDVKHEDPEVKFNWYVDGVEVHNAKTKPREEEYNSTYRVVSVLTVLHQDWLNGKEYKCKVSNKALPAPIEKTISKAKGQPREPQVYTLPPSREEMTKNQVSLTCDVSGFYPSDIAVEWESDGQPENNYKTTPPVLDSDGSFFLYSKLTVDKSRWEQGDVFSCSVMHEALHNHYTQKSLSLSPG

SEQ ID NO: 601 - protein, 214 aa, synthetic construct; identical to SEQ ID NO: 295
  source 1..214: note = XENP40236 Chain 3 - SilentFv_L0 Light Chain

SEQ ID NO: 602 - protein, 444 aa, synthetic construct; identical to SEQ ID NO: 386
  source 1..444: note = XENP40237 Chain 1 - SilentFv_H0_Fc(216)_IgG1_PVA_/S267K/S364K/E357Q/H435R/Y436Y /K447del

SEQ ID NO: 603 - protein, 387 aa, synthetic construct
  source 1..387: note = XENP40237 Chain 2 - human_IL18_4CS_E31Q_N111D_Fc(216)_IgG1_pI(-)_Isosteric_A_C2 20S/PVA_/S267K/L368D/K370S/K447del
YFGKLESKLSVIRNLNDQVLFIDQGNRPLFQDMTDSDSRDNAPRTIFIISMYKDSQPRGMAVTISVKSEKISTLSSENKIISFKEMNPPDNIKDTKSDIIFFQRSVPGHDDKMQFESSSYEGYFLASEKERDLFKLILKKEDELGDRSIMFTVQNEDEPKSSDKTHTCPPCPAPPVAGPSVFLFPPKPKDTLMISRTPEVTCVVVDVKHEDPEVKFNWYVDGVEVHNAKTKPREEEYNSTYRVVSVLTVLHQDWLNGKEYKCKVSNKALPAPIEKTISKAKGQPREPQVYTLPPSREEMTKNQVSLTCDVSGFYPSDIAVEWESDGQPENNYKTTPPVLDSDGSFFLYSKLTVDKSRWEQGDVFSCSVMHEALHNHYTQKSLSLSPG

SEQ ID NO: 604 - protein, 214 aa, synthetic construct; identical to SEQ ID NO: 295
  source 1..214: note = XENP40237 Chain 3 - SilentFv_L0 Light Chain

SEQ ID NO: 605 - protein, 444 aa, synthetic construct; identical to SEQ ID NO: 386
  source 1..444: note = XENP40238 Chain 1 - SilentFv_H0_Fc(216)_IgG1_PVA_/S267K/S364K/E357Q/H435R/Y436Y /K447del

SEQ ID NO: 606 - protein, 387 aa, synthetic construct
  source 1..387: note = XENP40238 Chain 2 - human_IL18_4CS_E31Q_M113I_Fc(216)_IgG1_pI(-)_Isosteric_A_C2 20S/PVA_/S267K/L368D/K370S/K447del
YFGKLESKLSVIRNLNDQVLFIDQGNRPLFQDMTDSDSRDNAPRTIFIISMYKDSQPRGMAVTISVKSEKISTLSSENKIISFKEMNPPDNIKDTKSDIIFFQRSVPGHDNKIQFESSSYEGYFLASEKERDLFKLILKKEDELGDRSIMFTVQNEDEPKSSDKTHTCPPCPAPPVAGPSVFLFPPKPKDTLMISRTPEVTCVVVDVKHEDPEVKFNWYVDGVEVHNAKTKPREEEYNSTYRVVSVLTVLHQDWLNGKEYKCKVSNKALPAPIEKTISKAKGQPREPQVYTLPPSREEMTKNQVSLTCDVSGFYPSDIAVEWESDGQPENNYKTTPPVLDSDGSFFLYSKLTVDKSRWEQGDVFSCSVMHEALHNHYTQKSLSLSPG

SEQ ID NO: 607 - protein, 214 aa, synthetic construct; identical to SEQ ID NO: 295
  source 1..214: note = XENP40238 Chain 3 - SilentFv_L0 Light Chain

SEQ ID NO: 608 - protein, 444 aa, synthetic construct; identical to SEQ ID NO: 386
  source 1..444: note = XENP40239 Chain 1 - SilentFv_H0_Fc(216)_IgG1_PVA_/S267K/S364K/E357Q/H435R/Y436Y /K447del

SEQ ID NO: 609 - protein, 387 aa, synthetic construct
  source 1..387: note = XENP40239 Chain 2 - human_IL18_4CS_E31Q_S119L_Fc(216)_IgG1_pI(-)_Isosteric_A_C2 20S/PVA_/S267K/L368D/K370S/K447del
YFGKLESKLSVIRNLNDQVLFIDQGNRPLFQDMTDSDSRDNAPRTIFIISMYKDSQPRGMAVTISVKSEKISTLSSENKIISFKEMNPPDNIKDTKSDIIFFQRSVPGHDNKMQFESSLYEGYFLASEKERDLFKLILKKEDELGDRSIMFTVQNEDEPKSSDKTHTCPPCPAPPVAGPSVFLFPPKPKDTLMISRTPEVTCVVVDVKHEDPEVKFNWYVDGVEVHNAKTKPREEEYNSTYRVVSVLTVLHQDWLNGKEYKCKVSNKALPAPIEKTISKAKGQPREPQVYTLPPSREEMTKNQVSLTCDVSGFYPSDIAVEWESDGQPENNYKTTPPVLDSDGSFFLYSKLTVDKSRWEQGDVFSCSVMHEALHNHYTQKSLSLSPG

SEQ ID NO: 610 - protein, 214 aa, synthetic construct; identical to SEQ ID NO: 295
  source 1..214: note = XENP40239 Chain 3 - SilentFv_L0 Light Chain

SEQ ID NO: 611 - protein, 444 aa, synthetic construct; identical to SEQ ID NO: 386
  source 1..444: note = XENP40240 Chain 1 - SilentFv_H0_Fc(216)_IgG1_PVA_/S267K/S364K/E357Q/H435R/Y436Y /K447del

SEQ ID NO: 612 - protein, 387 aa, synthetic construct
  source 1..387: note = XENP40240 Chain 2 - human_IL18_4CS_E31Q_L144N_Fc(216)_IgG1_pI(-)_Isosteric_A_C2 20S/PVA_/S267K/L368D/K370S/K447del
YFGKLESKLSVIRNLNDQVLFIDQGNRPLFQDMTDSDSRDNAPRTIFIISMYKDSQPRGMAVTISVKSEKISTLSSENKIISFKEMNPPDNIKDTKSDIIFFQRSVPGHDNKMQFESSSYEGYFLASEKERDLFKLILKKEDENGDRSIMFTVQNEDEPKSSDKTHTCPPCPAPPVAGPSVFLFPPKPKDTLMISRTPEVTCVVVDVKHEDPEVKFNWYVDGVEVHNAKTKPREEEYNSTYRVVSVLTVLHQDWLNGKEYKCKVSNKALPAPIEKTISKAKGQPREPQVYTLPPSREEMTKNQVSLTCDVSGFYPSDIAVEWESDGQPENNYKTTPPVLDSDGSFFLYSKLTVDKSRWEQGDVFSCSVMHEALHNHYTQKSLSLSPG

SEQ ID NO: 613 - protein, 214 aa, synthetic construct; identical to SEQ ID NO: 295
  source 1..214: note = XENP40240 Chain 3 - SilentFv_L0 Light Chain

SEQ ID NO: 614 - protein, 444 aa, synthetic construct; identical to SEQ ID NO: 386
  source 1..444: note = XENP40241 Chain 1 - SilentFv_H0_Fc(216)_IgG1_PVA_/S267K/S364K/E357Q/H435R/Y436Y /K447del

SEQ ID NO: 615 - protein, 387 aa, synthetic construct
  source 1..387: note = XENP40241 Chain 2 - human_IL18_4CS_E31Q_R147K_Fc(216)_IgG1_pI(-)_Isosteric_A_C2 20S/PVA_/S267K/L368D/K370S/K447del
YFGKLESKLSVIRNLNDQVLFIDQGNRPLFQDMTDSDSRDNAPRTIFIISMYKDSQPRGMAVTISVKSEKISTLSSENKIISFKEMNPPDNIKDTKSDIIFFQRSVPGHDNKMQFESSSYEGYFLASEKERDLFKLILKKEDELGDKSIMFTVQNEDEPKSSDKTHTCPPCPAPPVAGPSVFLFPPKPKDTLMISRTPEVTCVVVDVKHEDPEVKFNWYVDGVEVHNAKTKPREEEYNSTYRVVSVLTVLHQDWLNGKEYKCKVSNKALPAPIEKTISKAKGQPREPQVYTLPPSREEMTKNQVSLTCDVSGFYPSDIAVEWESDGQPENNYKTTPPVLDSDGSFFLYSKLTVDKSRWEQGDVFSCSVMHEALHNHYTQKSLSLSPG

SEQ ID NO: 616 - protein, 214 aa, synthetic construct; identical to SEQ ID NO: 295
  source 1..214: note = XENP40241 Chain 3 - SilentFv_L0 Light Chain

SEQ ID NO: 617 - protein, 444 aa, synthetic construct; identical to SEQ ID NO: 386
  source 1..444: note = XENP40242 Chain 1 - SilentFv_H0_Fc(216)_IgG1_PVA_/S267K/S364K/E357Q/H435R/Y436Y /K447del

SEQ ID NO: 618 - protein, 387 aa, synthetic construct
  source 1..387: note = XENP40242 Chain 2 - human_IL18_4CS_E31Q_I149V_Fc(216)_IgG1_pI(-)_Isosteric_A_C2 20S/PVA_/S267K/L368D/K370S/K447del
YFGKLESKLSVIRNLNDQVLFIDQGNRPLFQDMTDSDSRDNAPRTIFIISMYKDSQPRGMAVTISVKSEKISTLSSENKIISFKEMNPPDNIKDTKSDIIFFQRSVPGHDNKMQFESSSYEGYFLASEKERDLFKLILKKEDELGDRSVMFTVQNEDEPKSSDKTHTCPPCPAPPVAGPSVFLFPPKPKDTLMISRTPEVTCVVVDVKHEDPEVKFNWYVDGVEVHNAKTKPREEEYNSTYRVVSVLTVLHQDWLNGKEYKCKVSNKALPAPIEKTISKAKGQPREPQVYTLPPSREEMTKNQVSLTCDVSGFYPSDIAVEWESDGQPENNYKTTPPVLDSDGSFFLYSKLTVDKSRWEQGDVFSCSVMHEALHNHYTQKSLSLSPG

SEQ ID NO: 619 - protein, 214 aa, synthetic construct; identical to SEQ ID NO: 295
  source 1..214: note = XENP40242 Chain 3 - SilentFv_L0 Light Chain

SEQ ID NO: 620 - protein, 444 aa, synthetic construct; identical to SEQ ID NO: 386
  source 1..444: note = XENP40243 Chain 1 - SilentFv_H0_Fc(216)_IgG1_PVA_/S267K/S364K/E357Q/H435R/Y436Y /K447del

SEQ ID NO: 621 - protein, 387 aa, synthetic construct
  source 1..387: note = XENP40243 Chain 2 - human_IL18_4CS_E31Q_M150T_Fc(216)_IgG1_pI(-)_Isosteric_A_C2 20S/PVA_/S267K/L368D/K370S/K447del
YFGKLESKLSVIRNLNDQVLFIDQGNRPLFQDMTDSDSRDNAPRTIFIISMYKDSQPRGMAVTISVKSEKISTLSSENKIISFKEMNPPDNIKDTKSDIIFFQRSVPGHDNKMQFESSSYEGYFLASEKERDLFKLILKKEDELGDRSITFTVQNEDEPKSSDKTHTCPPCPAPPVAGPSVFLFPPKPKDTLMISRTPEVTCVVVDVKHEDPEVKFNWYVDGVEVHNAKTKPREEEYNSTYRVVSVLTVLHQDWLNGKEYKCKVSNKALPAPIEKTISKAKGQPREPQVYTLPPSREEMTKNQVSLTCDVSGFYPSDIAVEWESDGQPENNYKTTPPVLDSDGSFFLYSKLTVDKSRWEQGDVFSCSVMHEALHNHYTQKSLSLSPG

SEQ ID NO: 622 - protein, 214 aa, synthetic construct; identical to SEQ ID NO: 295
  source 1..214: note = XENP40243 Chain 3 - SilentFv_L0 Light Chain

SEQ ID NO: 623 - protein, 444 aa, synthetic construct; identical to SEQ ID NO: 386
  source 1..444: note = XENP40244 Chain 1 - SilentFv_H0_Fc(216)_IgG1_PVA_/S267K/S364K/E357Q/H435R/Y436Y /K447del

SEQ ID NO: 624 - protein, 387 aa, synthetic construct
  source 1..387: note = XENP40244 Chain 2 - human_IL18_4CS_E31Q_E156Q_D157N_Fc(216)_IgG1_pI(-)_Isosteri c_A_C220S/PVA_/S267K/L368D/K370S/K447del
YFGKLESKLSVIRNLNDQVLFIDQGNRPLFQDMTDSDSRDNAPRTIFIISMYKDSQPRGMAVTISVKSEKISTLSSENKIISFKEMNPPDNIKDTKSDIIFFQRSVPGHDNKMQFESSSYEGYFLASEKERDLFKLILKKEDELGDRSIMFTVQNQNEPKSSDKTHTCPPCPAPPVAGPSVFLFPPKPKDTLMISRTPEVTCVVVDVKHEDPEVKFNWYVDGVEVHNAKTKPREEEYNSTYRVVSVLTVLHQDWLNGKEYKCKVSNKALPAPIEKTISKAKGQPREPQVYTLPPSREEMTKNQVSLTCDVSGFYPSDIAVEWESDGQPENNYKTTPPVLDSDGSFFLYSKLTVDKSRWEQGDVFSCSVMHEALHNHYTQKSLSLSPG

SEQ ID NO: 625 - protein, 214 aa, synthetic construct; identical to SEQ ID NO: 295
  source 1..214: note = XENP40244 Chain 3 - SilentFv_L0 Light Chain

SEQ ID NO: 626 - protein, 444 aa, synthetic construct; identical to SEQ ID NO: 386
  source 1..444: note = XENP40246 Chain 1 - SilentFv_H0_Fc(216)_IgG1_PVA_/S267K/S364K/E357Q/H435R/Y436Y /K447del

SEQ ID NO: 627 - protein, 387 aa, synthetic construct; identical to SEQ ID NO: 259
  source 1..387: note = XENP40246 Chain 2 - human_IL18_4CS_Fc(216)_IgG1_pI(-)_Isosteric_A_C220S/PVA_/S2 67K/L368D/K370S/K447del

SEQ ID NO: 628 - protein, 214 aa, synthetic construct; identical to SEQ ID NO: 295
  source 1..214: note = XENP40246 Chain 3 - SilentFv_L0 Light Chain

SEQ ID NO: 629 - protein, 444 aa, synthetic construct; identical to SEQ ID NO: 386
  source 1..444: note = XENP40247 Chain 1 - SilentFv_H0_Fc(216)_IgG1_PVA_/S267K/S364K/E357Q/H435R/Y436Y /K447del

SEQ ID NO: 630 - protein, 387 aa, synthetic construct
  source 1..387: note = XENP40247 Chain 2 - human_IL18_4CS_K53S_Fc(216)_IgG1_pI(-)_Isosteric_A_C220S/PV A_/S267K/L368D/K370S/K447del
YFGKLESKLSVIRNLNDQVLFIDQGNRPLFEDMTDSDSRDNAPRTIFIISMYSDSQPRGMAVTISVKSEKISTLSSENKIISFKEMNPPDNIKDTKSDIIFFQRSVPGHDNKMQFESSSYEGYFLASEKERDLFKLILKKEDELGDRSIMFTVQNEDEPKSSDKTHTCPPCPAPPVAGPSVFLFPPKPKDTLMISRTPEVTCVVVDVKHEDPEVKFNWYVDGVEVHNAKTKPREEEYNSTYRVVSVLTVLHQDWLNGKEYKCKVSNKALPAPIEKTISKAKGQPREPQVYTLPPSREEMTKNQVSLTCDVSGFYPSDIAVEWESDGQPENNYKTTPPVLDSDGSFFLYSKLTVDKSRWEQGDVFSCSVMHEALHNHYTQKSLSLSPG

SEQ ID NO: 631 - protein, 214 aa, synthetic construct; identical to SEQ ID NO: 295
  source 1..214: note = XENP40247 Chain 3 - SilentFv_L0 Light Chain

SEQ ID NO: 632 - protein, 444 aa, synthetic construct; identical to SEQ ID NO: 386
  source 1..444: note = XENP40248 Chain 1 - SilentFv_H0_Fc(216)_IgG1_PVA_/S267K/S364K/E357Q/H435R/Y436Y /K447del

SEQ ID NO: 633 - protein, 387 aa, synthetic construct
  source 1..387: note = XENP40248 Chain 2 - human_IL18_4CS_K53G_Fc(216)_IgG1_pI(-)_Isosteric_A_C220S/PV A_/S267K/L368D/K370S/K447del
YFGKLESKLSVIRNLNDQVLFIDQGNRPLFEDMTDSDSRDNAPRTIFIISMYGDSQPRGMAVTISVKSEKISTLSSENKIISFKEMNPPDNIKDTKSDIIFFQRSVPGHDNKMQFESSSYEGYFLASEKERDLFKLILKKEDELGDRSIMFTVQNEDEPKSSDKTHTCPPCPAPPVAGPSVFLFPPKPKDTLMISRTPEVTCVVVDVKHEDPEVKFNWYVDGVEVHNAKTKPREEEYNSTYRVVSVLTVLHQDWLNGKEYKCKVSNKALPAPIEKTISKAKGQPREPQVYTLPPSREEMTKNQVSLTCDVSGFYPSDIAVEWESDGQPENNYKTTPPVLDSDGSFFLYSKLTVDKSRWEQGDVFSCSVMHEALHNHYTQKSLSLSPG

SEQ ID NO: 634 - protein, 214 aa, synthetic construct; identical to SEQ ID NO: 295
  source 1..214: note = XENP40248 Chain 3 - SilentFv_L0 Light Chain

SEQ ID NO: 635 - protein, 444 aa, synthetic construct; identical to SEQ ID NO: 386
  source 1..444: note = XENP40249 Chain 1 - SilentFv_H0_Fc(216)_IgG1_PVA_/S267K/S364K/E357Q/H435R/Y436Y /K447del

SEQ ID NO: 636 - protein, 387 aa, synthetic construct
  source 1..387: note = XENP40249 Chain 2 - human_IL18_4CS_K53T_Fc(216)_IgG1_pI(-)_Isosteric_A_C220S/PV A_/S267K/L368D/K370S/K447del
YFGKLESKLSVIRNLNDQVLFIDQGNRPLFEDMTDSDSRDNAPRTIFIISMYTDSQPRGMAVTISVKSEKISTLSSENKIISFKEMNPPDNIKDTKSDIIFFQRSVPGHDNKMQFESSSYEGYFLASEKERDLFKLILKKEDELGDRSIMFTVQNEDEPKSSDKTHTCPPCPAPPVAGPSVFLFPPKPKDTLMISRTPEVTCVVVDVKHEDPEVKFNWYVDGVEVHNAKTKPREEEYNSTYRVVSVLTVLHQDWLNGKEYKCKVSNKALPAPIEKTISKAKGQPREPQVYTLPPSREEMTKNQVSLTCDVSGFYPSDIAVEWESDGQPENNYKTTPPVLDSDGSFFLYSKLTVDKSRWEQGDVFSCSVMHEALHNHYTQKSLSLSPG

SEQ ID NO: 637 - protein, 214 aa, synthetic construct; identical to SEQ ID NO: 295
  source 1..214: note = XENP40249 Chain 3 - SilentFv_L0 Light Chain

SEQ ID NO: 638 - protein, 444 aa, synthetic construct; identical to SEQ ID NO: 386
  source 1..444: note = XENP40250 Chain 1 - SilentFv_H0_Fc(216)_IgG1_PVA_/S267K/S364K/E357Q/H435R/Y436Y /K447del

SEQ ID NO: 639 - protein, 387 aa, synthetic construct
  source 1..387: note = XENP40250 Chain 2 - human_IL18_4CS_K53I_Fc(216)_IgG1_pI(-)_Isosteric_A_C220S/PV A_/S267K/L368D/K370S/K447del
YFGKLESKLSVIRNLNDQVLFIDQGNRPLFEDMTDSDSRDNAPRTIFIISMYIDSQPRGMAVTISVKSEKISTLSSENKIISFKEMNPPDNIKDTKSDIIFFQRSVPGHDNKMQFESSSYEGYFLASEKERDLFKLILKKEDELGDRSIMFTVQNEDEPKSSDKTHTCPPCPAPPVAGPSVFLFPPKPKDTLMISRTPEVTCVVVDVKHEDPEVKFNWYVDGVEVHNAKTKPREEEYNSTYRVVSVLTVLHQDWLNGKEYKCKVSNKALPAPIEKTISKAKGQPREPQVYTLPPSREEMTKNQVSLTCDVSGFYPSDIAVEWESDGQPENNYKTTPPVLDSDGSFFLYSKLTVDKSRWEQGDVFSCSVMHEALHNHYTQKSLSLSPG

SEQ ID NO: 640 - protein, 214 aa, synthetic construct; identical to SEQ ID NO: 295
  source 1..214: note = XENP40250 Chain 3 - SilentFv_L0 Light Chain

SEQ ID NO: 641 - protein, 444 aa, synthetic construct; identical to SEQ ID NO: 386
  source 1..444: note = XENP40251 Chain 1 - SilentFv_H0_Fc(216)_IgG1_PVA_/S267K/S364K/E357Q/H435R/Y436Y /K447del

SEQ ID NO: 642 - protein, 387 aa, synthetic construct
  source 1..387: note = XENP40251 Chain 2 - human_IL18_4CS_K53L_Fc(216)_IgG1_pI(-)_Isosteric_A_C220S/PV A_/S267K/L368D/K370S/K447del
YFGKLESKLSVIRNLNDQVLFIDQGNRPLFEDMTDSDSRDNAPRTIFIISMYLDSQPRGMAVTISVKSEKISTLSSENKIISFKEMNPPDNIKDTKSDIIFFQRSVPGHDNKMQFESSSYEGYFLASEKERDLFKLILKKEDELGDRSIMFTVQNEDEPKSSDKTHTCPPCPAPPVAGPSVFLFPPKPKDTLMISRTPEVTCVVVDVKHEDPEVKFNWYVDGVEVHNAKTKPREEEYNSTYRVVSVLTVLHQDWLNGKEYKCKVSNKALPAPIEKTISKAKGQPREPQVYTLPPSREEMTKNQVSLTCDVSGFYPSDIAVEWESDGQPENNYKTTPPVLDSDGSFFLYSKLTVDKSRWEQGDVFSCSVMHEALHNHYTQKSLSLSPG

SEQ ID NO: 643 - protein, 214 aa, synthetic construct; identical to SEQ ID NO: 295
  source 1..214: note = XENP40251 Chain 3 - SilentFv_L0 Light Chain

SEQ ID NO: 644 - protein, 444 aa, synthetic construct; identical to SEQ ID NO: 386
  source 1..444: note = XENP40252 Chain 1 - SilentFv_H0_Fc(216)_IgG1_PVA_/S267K/S364K/E357Q/H435R/Y436Y /K447del

SEQ ID NO: 645 - protein, 387 aa, synthetic construct
  source 1..387: note = XENP40252 Chain 2 - human_IL18_4CS_K53N_Fc(216)_IgG1_pI(-)_Isosteric_A_C220S/PV A_/S267K/L368D/K370S/K447del
YFGKLESKLSVIRNLNDQVLFIDQGNRPLFEDMTDSDSRDNAPRTIFIISMYNDSQPRGMAVTISVKSEKISTLSSENKIISFKEMNPPDNIKDTKSDIIFFQRSVPGHDNKMQFESSSYEGYFLASEKERDLFKLILKKEDELGDRSIMFTVQNEDEPKSSDKTHTCPPCPAPPVAGPSVFLFPPKPKDTLMISRTPEVTCVVVDVKHEDPEVKFNWYVDGVEVHNAKTKPREEEYNSTYRVVSVLTVLHQDWLNGKEYKCKVSNKALPAPIEKTISKAKGQPREPQVYTLPPSREEMTKNQVSLTCDVSGFYPSDIAVEWESDGQPENNYKTTPPVLDSDGSFFLYSKLTVDKSRWEQGDVFSCSVMHEALHNHYTQKSLSLSPG

SEQ ID NO: 646 - protein, 214 aa, synthetic construct; identical to SEQ ID NO: 295
  source 1..214: note = XENP40252 Chain 3 - SilentFv_L0 Light Chain

SEQ ID NO: 647 - protein, 444 aa, synthetic construct; identical to SEQ ID NO: 386
  source 1..444: note = XENP40253 Chain 1 - SilentFv_H0_Fc(216)_IgG1_PVA_/S267K/S364K/E357Q/H435R/Y436Y /K447del

SEQ ID NO: 648 - protein, 387 aa, synthetic construct
  source 1..387: note = XENP40253 Chain 2 - human_IL18_4CS_K53D_Fc(216)_IgG1_pI(-)_Isosteric_A_C220S/PV A_/S267K/L368D/K370S/K447del
YFGKLESKLSVIRNLNDQVLFIDQGNRPLFEDMTDSDSRDNAPRTIFIISMYDDSQPRGMAVTISVKSEKISTLSSENKIISFKEMNPPDNIKDTKSDIIFFQRSVPGHDNKMQFESSSYEGYFLASEKERDLFKLILKKEDELGDRSIMFTVQNEDEPKSSDKTHTCPPCPAPPVAGPSVFLFPPKPKDTLMISRTPEVTCVVVDVKHEDPEVKFNWYVDGVEVHNAKTKPREEEYNSTYRVVSVLTVLHQDWLNGKEYKCKVSNKALPAPIEKTISKAKGQPREPQVYTLPPSREEMTKNQVSLTCDVSGFYPSDIAVEWESDGQPENNYKTTPPVLDSDGSFFLYSKLTVDKSRWEQGDVFSCSVMHEALHNHYTQKSLSLSPG

SEQ ID NO: 649 - protein, 214 aa, synthetic construct; identical to SEQ ID NO: 295
  source 1..214: note = XENP40253 Chain 3 - SilentFv_L0 Light Chain

SEQ ID NO: 650 - protein, 444 aa, synthetic construct; identical to SEQ ID NO: 386
  source 1..444: note = XENP40254 Chain 1 - SilentFv_H0_Fc(216)_IgG1_PVA_/S267K/S364K/E357Q/H435R/Y436Y /K447del

SEQ ID NO: 651 - protein, 387 aa, synthetic construct
  source 1..387: note = XENP40254 Chain 2 - human_IL18_4CS_M51K_Fc(216)_IgG1_pI(-)_Isosteric_A_C220S/PV A_/S267K/L368D/K370S/K447del
YFGKLESKLSVIRNLNDQVLFIDQGNRPLFEDMTDSDSRDNAPRTIFIISKYKDSQPRGMAVTISVKSEKISTLSSENKIISFKEMNPPDNIKDTKSDIIFFQRSVPGHDNKMQFESSSYEGYFLASEKERDLFKLILKKEDELGDRSIMFTVQNEDEPKSSDKTHTCPPCPAPPVAGPSVFLFPPKPKDTLMISRTPEVTCVVVDVKHEDPEVKFNWYVDGVEVHNAKTKPREEEYNSTYRVVSVLTVLHQDWLNGKEYKCKVSNKALPAPIEKTISKAKGQPREPQVYTLPPSREEMTKNQVSLTCDVSGFYPSDIAVEWESDGQPENNYKTTPPVLDSDGSFFLYSKLTVDKSRWEQGDVFSCSVMHEALHNHYTQKSLSLSPG

SEQ ID NO: 652 - protein, 214 aa, synthetic construct; identical to SEQ ID NO: 295
  source 1..214: note = XENP40254 Chain 3 - SilentFv_L0 Light Chain

SEQ ID NO: 653 - protein, 444 aa, synthetic construct; identical to SEQ ID NO: 386
  source 1..444: note = XENP40255 Chain 1 - SilentFv_H0_Fc(216)_IgG1_PVA_/S267K/S364K/E357Q/H435R/Y436Y /K447del

SEQ ID NO: 654 - protein, 387 aa, synthetic construct
  source 1..387: note = XENP40255 Chain 2 - human_IL18_4CS_M51Q_Fc(216)_IgG1_pI(-)_Isosteric_A_C220S/PV A_/S267K/L368D/K370S/K447del
YFGKLESKLSVIRNLNDQVLFIDQGNRPLFEDMTDSDSRDNAPRTIFIISQYKDSQPRGMAVTISVKSEKISTLSSENKIISFKEMNPPDNIKDTKSDIIFFQRSVPGHDNKMQFESSSYEGYFLASEKERDLFKLILKKEDELGDRSIMFTVQNEDEPKSSDKTHTCPPCPAPPVAGPSVFLFPPKPKDTLMISRTPEVTCVVVDVKHEDPEVKFNWYVDGVEVHNAKTKPREEEYNSTYRVVSVLTVLHQDWLNGKEYKCKVSNKALPAPIEKTISKAKGQPREPQVYTLPPSREEMTKNQVSLTCDVSGFYPSDIAVEWESDGQPENNYKTTPPVLDSDGSFFLYSKLTVDKSRWEQGDVFSCSVMHEALHNHYTQKSLSLSPG

SEQ ID NO: 655 - protein, 214 aa, synthetic construct; identical to SEQ ID NO: 295
  source 1..214: note = XENP40255 Chain 3 - SilentFv_L0 Light Chain

SEQ ID NO: 656 - protein, 444 aa, synthetic construct; identical to SEQ ID NO: 386
  source 1..444: note = XENP40256 Chain 1 - SilentFv_H0_Fc(216)_IgG1_PVA_/S267K/S364K/E357Q/H435R/Y436Y /K447del

SEQ ID NO: 657 - protein, 387 aa, synthetic construct
  source 1..387: note = XENP40256 Chain 2 - human_IL18_4CS_M51I_Fc(216)_IgG1_pI(-)_Isosteric_A_C220S/PV A_/S267K/L368D/K370S/K447del
YFGKLESKLSVIRNLNDQVLFIDQGNRPLFEDMTDSDSRDNAPRTIFIISIYKDSQPRGMAVTISVKSEKISTLSSENKIISFKEMNPPDNIKDTKSDIIFFQRSVPGHDNKMQFESSSYEGYFLASEKERDLFKLILKKEDELGDRSIMFTVQNEDEPKSSDKTHTCPPCPAPPVAGPSVFLFPPKPKDTLMISRTPEVTCVVVDVKHEDPEVKFNWYVDGVEVHNAKTKPREEEYNSTYRVVSVLTVLHQDWLNGKEYKCKVSNKALPAPIEKTISKAKGQPREPQVYTLPPSREEMTKNQVSLTCDVSGFYPSDIAVEWESDGQPENNYKTTPPVLDSDGSFFLYSKLTVDKSRWEQGDVFSCSVMHEALHNHYTQKSLSLSPG

SEQ ID NO: 658 - protein, 214 aa, synthetic construct; identical to SEQ ID NO: 295
  source 1..214: note = XENP40256 Chain 3 - SilentFv_L0 Light Chain

SEQ ID NO: 659 - protein, 444 aa, synthetic construct; identical to SEQ ID NO: 386
  source 1..444: note = XENP40257 Chain 1 - SilentFv_H0_Fc(216)_IgG1_PVA_/S267K/S364K/E357Q/H435R/Y436Y /K447del

SEQ ID NO: 660 - protein, 387 aa, synthetic construct
  source 1..387: note = XENP40257 Chain 2 - human_IL18_4CS_S55N_Fc(216)_IgG1_pI(-)_Isosteric_A_C220S/PV A_/S267K/L368D/K370S/K447del
YFGKLESKLSVIRNLNDQVLFIDQGNRPLFEDMTDSDSRDNAPRTIFIISMYKDNQPRGMAVTISVKSEKISTLSSENKIISFKEMNPPDNIKDTKSDIIFFQRSVPGHDNKMQFESSSYEGYFLASEKERDLFKLILKKEDELGDRSIMFTVQNEDEPKSSDKTHTCPPCPAPPVAGPSVFLFPPKPKDTLMISRTPEVTCVVVDVKHEDPEVKFNWYVDGVEVHNAKTKPREEEYNSTYRVVSVLTVLHQDWLNGKEYKCKVSNKALPAPIEKTISKAKGQPREPQVYTLPPSREEMTKNQVSLTCDVSGFYPSDIAVEWESDGQPENNYKTTPPVLDSDGSFFLYSKLTVDKSRWEQGDVFSCSVMHEALHNHYTQKSLSLSPG

SEQ ID NO: 661 - protein, 214 aa, synthetic construct; identical to SEQ ID NO: 295
  source 1..214: note = XENP40257 Chain 3 - SilentFv_L0 Light Chain

SEQ ID NO: 662 - protein, 444 aa, synthetic construct; identical to SEQ ID NO: 386
  source 1..444: note = XENP40258 Chain 1 - SilentFv_H0_Fc(216)_IgG1_PVA_/S267K/S364K/E357Q/H435R/Y436Y /K447del

SEQ ID NO: 663 - protein, 387 aa, synthetic construct
  source 1..387: note = XENP40258 Chain 2 - human_IL18_4CS_S55Q_Fc(216)_IgG1_pI(-)_Isosteric_A_C220S/PV A_/S267K/L368D/K370S/K447del
YFGKLESKLSVIRNLNDQVLFIDQGNRPLFEDMTDSDSRDNAPRTIFIISMYKDQQPRGMAVTISVKSEKISTLSSENKIISFKEMNPPDNIKDTKSDIIFFQRSVPGHDNKMQFESSSYEGYFLASEKERDLFKLILKKEDELGDRSIMFTVQNEDEPKSSDKTHTCPPCPAPPVAGPSVFLFPPKPKDTLMISRTPEVTCVVVDVKHEDPEVKFNWYVDGVEVHNAKTKPREEEYNSTYRVVSVLTVLHQDWLNGKEYKCKVSNKALPAPIEKTISKAKGQPREPQVYTLPPSREEMTKNQVSLTCDVSGFYPSDIAVEWESDGQPENNYKTTPPVLDSDGSFFLYSKLTVDKSRWEQGDVFSCSVMHEALHNHYTQKSLSLSPG

SEQ ID NO: 664 - protein, 214 aa, synthetic construct; identical to SEQ ID NO: 295
  source 1..214: note = XENP40258 Chain 3 - SilentFv_L0 Light Chain

SEQ ID NO: 665 - protein, 387 aa, synthetic construct
  source 1..387: note = XENP40259 Chain 2 - human_IL18_4CS_Q56L_Fc(216)_IgG1_pI(-)_Isosteric_A_C220S/PV A_/S267K/L368D/K370S/K447del
YFGKLESKLSVIRNLNDQVLFIDQGNRPLFEDMTDSDSRDNAPRTIFIISMYKDSLPRGMAVTISVKSEKISTLSSENKIISFKEMNPPDNIKDTKSDIIFFQRSVPGHDNKMQFESSSYEGYFLASEKERDLFKLILKKEDELGDRSIMFTVQNEDEPKSSDKTHTCPPCPAPPVAGPSVFLFPPKPKDTLMISRTPEVTCVVVDVKHEDPEVKFNWYVDGVEVHNAKTKPREEEYNSTYRVVSVLTVLHQDWLNGKEYKCKVSNKALPAPIEKTISKAKGQPREPQVYTLPPSREEMTKNQVSLTCDVSGFYPSDIAVEWESDGQPENNYKTTPPVLDSDGSFFLYSKLTVDKSRWEQGDVFSCSVMHEALHNHYTQKSLSLSPG

SEQ ID NO: 666 - protein, 214 aa, synthetic construct; identical to SEQ ID NO: 295
  source 1..214: note = XENP40259 Chain 3 - SilentFv_L0 Light Chain

SEQ ID NO: 667 - protein, 444 aa, synthetic construct; identical to SEQ ID NO: 386
  source 1..444: note = XENP40260 Chain 1 - SilentFv_H0_Fc(216)_IgG1_PVA_/S267K/S364K/E357Q/H435R/Y436Y /K447del

SEQ ID NO: 668 - protein, 387 aa, synthetic construct
  source 1..387: note = XENP40260 Chain 2 - human_IL18_4CS_Q56I_Fc(216)_IgG1_pI(-)_Isosteric_A_C220S/PV A_/S267K/L368D/K370S/K447del
YFGKLESKLSVIRNLNDQVLFIDQGNRPLFEDMTDSDSRDNAPRTIFIISMYKDSIPRGMAVTISVKSEKISTLSSENKIISFKEMNPPDNIKDTKSDIIFFQRSVPGHDNKMQFESSSYEGYFLASEKERDLFKLILKKEDELGDRSIMFTVQNEDEPKSSDKTHTCPPCPAPPVAGPSVFLFPPKPKDTLMISRTPEVTCVVVDVKHEDPEVKFNWYVDGVEVHNAKTKPREEEYNSTYRVVSVLTVLHQDWLNGKEYKCKVSNKALPAPIEKTISKAKGQPREPQVYTLPPSREEMTKNQVSLTCDVSGFYPSDIAVEWESDGQPENNYKTTPPVLDSDGSFFLYSKLTVDKSRWEQGDVFSCSVMHEALHNHYTQKSLSLSPG

SEQ ID NO: 669 - protein, 214 aa, synthetic construct; identical to SEQ ID NO: 295
  source 1..214: note = XENP40260 Chain 3 - SilentFv_L0 Light Chain

SEQ ID NO: 670 - protein, 444 aa, synthetic construct; identical to SEQ ID NO: 386
  source 1..444: note = XENP40261 Chain 1 - SilentFv_H0_Fc(216)_IgG1_PVA_/S267K/S364K/E357Q/H435R/Y436Y /K447del

SEQ ID NO: 671 - protein, 387 aa, synthetic construct
  source 1..387: note = XENP40261 Chain 2 - human_IL18_4CS_P57A_Fc(216)_IgG1_pI(-)_Isosteric_A_C220S/PV A_/S267K/L368D/K370S/K447del
YFGKLESKLSVIRNLNDQVLFIDQGNRPLFEDMTDSDSRDNAPRTIFIISMYKDSQARGMAVTISVKSEKISTLSSENKIISFKEMNPPDNIKDTKSDIIFFQRSVPGHDNKMQFESSSYEGYFLASEKERDLFKLILKKEDELGDRSIMFTVQNEDEPKSSDKTHTCPPCPAPPVAGPSVFLFPPKPKDTLMISRTPEVTCVVVDVKHEDPEVKFNWYVDGVEVHNAKTKPREEEYNSTYRVVSVLTVLHQDWLNGKEYKCKVSNKALPAPIEKTISKAKGQPREPQVYTLPPSREEMTKNQVSLTCDVSGFYPSDIAVEWESDGQPENNYKTTPPVLDSDGSFFLYSKLTVDKSRWEQGDVFSCSVMHEALHNHYTQKSLSLSPG

SEQ ID NO: 672 - protein, 214 aa, synthetic construct; identical to SEQ ID NO: 295
  source 1..214: note = XENP40261 Chain 3 - SilentFv_L0 Light Chain

SEQ ID NO: 673 - protein, 444 aa, synthetic construct; identical to SEQ ID NO: 386
  source 1..444: note = XENP40262 Chain 1 - SilentFv_H0_Fc(216)_IgG1_PVA_/S267K/S364K/E357Q/H435R/Y436Y /K447del

SEQ ID NO: 674 - protein, 387 aa, synthetic construct
  source 1..387: note = XENP40262 Chain 2 - human_IL18_4CS_P57E_Fc(216)_IgG1_pI(-)_Isosteric_A_C220S/PV A_/S267K/L368D/K370S/K447del
YFGKLESKLSVIRNLNDQVLFIDQGNRPLFEDMTDSDSRDNAPRTIFIISMYKDSQERGMAVTISVKSEKISTLSSENKIISFKEMNPPDNIKDTKSDIIFFQRSVPGHDNKMQFESSSYEGYFLASEKERDLFKLILKKEDELGDRSIMFTVQNEDEPKSSDKTHTCPPCPAPPVAGPSVFLFPPKPKDTLMISRTPEVTCVVVDVKHEDPEVKFNWYVDGVEVHNAKTKPREEEYNSTYRVVSVLTVLHQDWLNGKEYKCKVSNKALPAPIEKTISKAKGQPREPQVYTLPPSREEMTKNQVSLTCDVSGFYPSDIAVEWESDGQPENNYKTTPPVLDSDGSFFLYSKLTVDKSRWEQGDVFSCSVMHEALHNHYTQKSLSLSPG

SEQ ID NO: 675 - protein, 214 aa, synthetic construct; identical to SEQ ID NO: 295
  source 1..214: note = XENP40262 Chain 3 - SilentFv_L0 Light Chain

SEQ ID NO: 676 - protein, 444 aa, synthetic construct; identical to SEQ ID NO: 386
  source 1..444: note = XENP40263 Chain 1 - SilentFv_H0_Fc(216)_IgG1_PVA_/S267K/S364K/E357Q/H435R/Y436Y /K447del

SEQ ID NO: 677 - protein, 387 aa, synthetic construct
  source 1..387: note = XENP40263 Chain 2 - human_IL18_4CS_M60L_Fc(216)_IgG1_pI(-)_Isosteric_A_C220S/PV A_/S267K/L368D/K370S/K447del
YFGKLESKLSVIRNLNDQVLFIDQGNRPLFEDMTDSDSRDNAPRTIFIISMYKDSQPRGLAVTISVKSEKISTLSSENKIISFKEMNPPDNIKDTKSDIIFFQRSVPGHDNKMQFESSSYEGYFLASEKERDLFKLILKKEDELGDRSIMFTVQNEDEPKSSDKTHTCPPCPAPPVAGPSVFLFPPKPKDTLMISRTPEVTCVVVDVKHEDPEVKFNWYVDGVEVHNAKTKPREEEYNSTYRVVSVLTVLHQDWLNGKEYKCKVSNKALPAPIEKTISKAKGQPREPQVYTLPPSREEMTKNQVSLTCDVSGFYPSDIAVEWESDGQPENNYKTTPPVLDSDGSFFLYSKLTVDKSRWEQGDVFSCSVMHEALHNHYTQKSLSLSPG

SEQ ID NO: 678 - protein, 214 aa, synthetic construct; identical to SEQ ID NO: 295
  source 1..214: note = XENP40263 Chain 3 - SilentFv_L0 Light Chain

SEQ ID NO: 679 - protein, 444 aa, synthetic construct; identical to SEQ ID NO: 386
  source 1..444: note = XENP40264 Chain 1 - SilentFv_H0_Fc(216)_IgG1_PVA_/S267K/S364K/E357Q/H435R/Y436Y /K447del

SEQ ID NO: 680 - protein, 387 aa, synthetic construct
  source 1..387: note = XENP40264 Chain 2 - human_IL18_4CS_M60I_Fc(216)_IgG1_pI(-)_Isosteric_A_C220S/PV A_/S267K/L368D/K370S/K447del
YFGKLESKLSVIRNLNDQVLFIDQGNRPLFEDMTDSDSRDNAPRTIFIISMYKDSQPRGIAVTISVKSEKISTLSSENKIISFKEMNPPDNIKDTKSDIIFFQRSVPGHDNKMQFESSSYEGYFLASEKERDLFKLILKKEDELGDRSIMFTVQNEDEPKSSDKTHTCPPCPAPPVAGPSVFLFPPKPKDTLMISRTPEVTCVVVDVKHEDPEVKFNWYVDGVEVHNAKTKPREEEYNSTYRVVSVLTVLHQDWLNGKEYKCKVSNKALPAPIEKTISKAKGQPREPQVYTLPPSREEMTKNQVSLTCDVSGFYPSDIAVEWESDGQPENNYKTTPPVLDSDGSFFLYSKLTVDKSRWEQGDVFSCSVMHEALHNHYTQKSLSLSPG

SEQ ID NO: 681 - protein, 214 aa, synthetic construct; identical to SEQ ID NO: 295
  source 1..214: note = XENP40264 Chain 3 - SilentFv_L0 Light Chain

SEQ ID NO: 682 - protein, 444 aa, synthetic construct; identical to SEQ ID NO: 386
  source 1..444: note = XENP40265 Chain 1 - SilentFv_H0_Fc(216)_IgG1_PVA_/S267K/S364K/E357Q/H435R/Y436Y /K447del

SEQ ID NO: 683 - protein, 387 aa, synthetic construct
  source 1..387: note = XENP40265 Chain 2 - human_IL18_4CS_K8Y_Fc(216)_IgG1_pI(-)_Isosteric_A_C220S/PVA _/S267K/L368D/K370S/K447del
YFGKLESYLSVIRNLNDQVLFIDQGNRPLFEDMTDSDSRDNAPRTIFIISMYKDSQPRGMAVTISVKSEKISTLSSENKIISFKEMNPPDNIKDTKSDIIFFQRSVPGHDNKMQFESSSYEGYFLASEKERDLFKLILKKEDELGDRSIMFTVQNEDEPKSSDKTHTCPPCPAPPVAGPSVFLFPPKPKDTLMISRTPEVTCVVVDVKHEDPEVKFNWYVDGVEVHNAKTKPREEEYNSTYRVVSVLTVLHQDWLNGKEYKCKVSNKALPAPIEKTISKAKGQPREPQVYTLPPSREEMTKNQVSLTCDVSGFYPSDIAVEWESDGQPENNYKTTPPVLDSDGSFFLYSKLTVDKSRWEQGDVFSCSVMHEALHNHYTQKSLSLSPG

SEQ ID NO: 684 - protein, 214 aa, synthetic construct; identical to SEQ ID NO: 295
  source 1..214: note = XENP40265 Chain 3 - SilentFv_L0 Light Chain

SEQ ID NO: 685 - protein, 444 aa, synthetic construct; identical to SEQ ID NO: 386
  source 1..444: note = XENP40266 Chain 1 - SilentFv_H0_Fc(216)_IgG1_PVA_/S267K/S364K/E357Q/H435R/Y436Y /K447del

SEQ ID NO: 686 - protein, 387 aa, synthetic construct
  source 1..387: note = XENP40266 Chain 2 - human_IL18_4CS_K8Q_Fc(216)_IgG1_pI(-)_Isosteric_A_C220S/PVA _/S267K/L368D/K370S/K447del
YFGKLESQLSVIRNLNDQVLFIDQGNRPLFEDMTDSDSRDNAPRTIFIISMYKDSQPRGMAVTISVKSEKISTLSSENKIISFKEMNPPDNIKDTKSDIIFFQRSVPGHDNKMQFESSSYEGYFLASEKERDLFKLILKKEDELGDRSIMFTVQNEDEPKSSDKTHTCPPCPAPPVAGPSVFLFPPKPKDTLMISRTPEVTCVVVDVKHEDPEVKFNWYVDGVEVHNAKTKPREEEYNSTYRVVSVLTVLHQDWLNGKEYKCKVSNKALPAPIEKTISKAKGQPREPQVYTLPPSREEMTKNQVSLTCDVSGFYPSDIAVEWESDGQPENNYKTTPPVLDSDGSFFLYSKLTVDKSRWEQGDVFSCSVMHEALHNHYTQKSLSLSPG

SEQ ID NO: 687 - protein, 214 aa, synthetic construct; identical to SEQ ID NO: 295
  source 1..214: note = XENP40266 Chain 3 - SilentFv_L0 Light Chain

SEQ ID NO: 688 - protein, 444 aa, synthetic construct; identical to SEQ ID NO: 386
  source 1..444: note = XENP40267 Chain 1 - SilentFv_H0_Fc(216)_IgG1_PVA_/S267K/S364K/E357Q/H435R/Y436Y /K447del

SEQ ID NO: 689 - protein, 387 aa, synthetic construct
  source 1..387: note = XENP40267 Chain 2 - human_IL18_4CS_K8E_Fc(216)_IgG1_pI(-)_Isosteric_A_C220S/PVA _/S267K/L368D/K370S/K447del
YFGKLESELSVIRNLNDQVLFIDQGNRPLFEDMTDSDSRDNAPRTIFIISMYKDSQPRGMAVTISVKSEKISTLSSENKIISFKEMNPPDNIKDTKSDIIFFQRSVPGHDNKMQFESSSYEGYFLASEKERDLFKLILKKEDELGDRSIMFTVQNEDEPKSSDKTHTCPPCPAPPVAGPSVFLFPPKPKDTLMISRTPEVTCVVVDVKHEDPEVKFNWYVDGVEVHNAKTKPREEEYNSTYRVVSVLTVLHQDWLNGKEYKCKVSNKALPAPIEKTISKAKGQPREPQVYTLPPSREEMTKNQVSLTCDVSGFYPSDIAVEWESDGQPENNYKTTPPVLDSDGSFFLYSKLTVDKSRWEQGDVFSCSVMHEALHNHYTQKSLSLSPG

SEQ ID NO: 690 - protein, 214 aa, synthetic construct; identical to SEQ ID NO: 295
  source 1..214: note = XENP40267 Chain 3 - SilentFv_L0 Light Chain

SEQ ID NO: 691 - protein, 444 aa, synthetic construct; identical to SEQ ID NO: 386
  source 1..444: note = XENP40268 Chain 1 - SilentFv_H0_Fc(216)_IgG1_PVA_/S267K/S364K/E357Q/H435R/Y436Y /K447del

SEQ ID NO: 692 - protein, 387 aa, synthetic construct
  source 1..387: note = XENP40268 Chain 2 - human_IL18_4CS_H109W_Fc(216)_IgG1_pI(-)_Isosteric_A_C220S/P VA_/S267K/L368D/K370S/K447del
YFGKLESKLSVIRNLNDQVLFIDQGNRPLFEDMTDSDSRDNAPRTIFIISMYKDSQPRGMAVTISVKSEKISTLSSENKIISFKEMNPPDNIKDTKSDIIFFQRSVPGWDNKMQFESSSYEGYFLASEKERDLFKLILKKEDELGDRSIMFTVQNEDEPKSSDKTHTCPPCPAPPVAGPSVFLFPPKPKDTLMISRTPEVTCVVVDVKHEDPEVKFNWYVDGVEVHNAKTKPREEEYNSTYRVVSVLTVLHQDWLNGKEYKCKVSNKALPAPIEKTISKAKGQPREPQVYTLPPSREEMTKNQVSLTCDVSGFYPSDIAVEWESDGQPENNYKTTPPVLDSDGSFFLYSKLTVDKSRWEQGDVFSCSVMHEALHNHYTQKSLSLSPG

SEQ ID NO: 693 - protein, 214 aa, synthetic construct; identical to SEQ ID NO: 295
  source 1..214: note = XENP40268 Chain 3 - SilentFv_L0 Light Chain

SEQ ID NO: 694 - protein, 444 aa, synthetic construct; identical to SEQ ID NO: 386
  source 1..444: note = XENP40269 Chain 1 - SilentFv_H0_Fc(216)_IgG1_PVA_/S267K/S364K/E357Q/H435R/Y436Y /K447del

SEQ ID NO: 695 - protein, 387 aa, synthetic construct
  source 1..387: note = XENP40269 Chain 2 - human_IL18_4CS_H109Y_Fc(216)_IgG1_pI(-)_Isosteric_A_C220S/P VA_/S267K/L368D/K370S/K447del
YFGKLESKLSVIRNLNDQVLFIDQGNRPLFEDMTDSDSRDNAPRTIFIISMYKDSQPRGMAVTISVKSEKISTLSSENKIISFKEMNPPDNIKDTKSDIIFFQRSVPGYDNKMQFESSSYEGYFLASEKERDLFKLILKKEDELGDRSIMFTVQNEDEPKSSDKTHTCPPCPAPPVAGPSVFLFPPKPKDTLMISRTPEVTCVVVDVKHEDPEVKFNWYVDGVEVHNAKTKPREEEYNSTYRVVSVLTVLHQDWLNGKEYKCKVSNKALPAPIEKTISKAKGQPREPQVYTLPPSREEMTKNQVSLTCDVSGFYPSDIAVEWESDGQPENNYKTTPPVLDSDGSFFLYSKLTVDKSRWEQGDVFSCSVMHEALHNHYTQKSLSLSPG

SEQ ID NO: 696 - protein, 214 aa, synthetic construct; identical to SEQ ID NO: 295
  source 1..214: note = XENP40269 Chain 3 - SilentFv_L0 Light Chain

SEQ ID NO: 697 - protein, 444 aa, synthetic construct; identical to SEQ ID NO: 386
  source 1..444: note = XENP40363 Chain 1 - mouse_IL18_(GGGGS)1-SilentFv_H0_Fc(216)_IgG1_PVA_/S267K/S36 4K/E357Q/H435R/Y436Y/K447del

SEQ ID NO: 698 - protein, 392 aa, synthetic construct
  source 1..392: note = XENP40363 Chain 2 - mouse_IL18_(GGGGS)1_Fc(216)_IgG1_pI(-)_Isosteric_A_C220S/PV A_/S267K/L368D/K370S/K447del
NFGRLHCTTAVIRNINDQVLFVDKRQPVFEDMTDIDQSASEPQTRLIIYMYKDSEVRGLAVTLSVKDSKMSTLSCKNKIISFEEMDPPENIDDIQSDLIFFQKRVPGHNKMEFESSLYEGHFLACQKEDDAFKLILKKKDENGDKSVMFTLTNLHQSGGGGSEPKSSDKTHTCPPCPAPPVAGPSVFLFPPKPKDTLMISRTPEVTCVVVDVKHEDPEVKFNWYVDGVEVHNAKTKPREEEYNSTYRVVSVLTVLHQDWLNGKEYKCKVSNKALPAPIEKTISKAKGQPREPQVYTLPPSREEMTKNQVSLTCDVSGFYPSDIAVEWESDGQPENNYKTTPPVLDSDGSFFLYSKLTVDKSRWEQGDVFSCSVMHEALHNHYTQKSLSLSPG

SEQ ID NO: 699 - protein, 214 aa, synthetic construct; identical to SEQ ID NO: 295
  source 1..214: note = XENP40363 Chain 3 - SilentFv_L0 Light Chain

SEQ ID NO: 700 - protein, 444 aa, synthetic construct; identical to SEQ ID NO: 386
  source 1..444: note = XENP40364 Chain 1 - mouse_IL18_3CS_(GGGGS)1-SilentFv_H0_Fc(216)_IgG1_PVA_/S267K /S364K/E357Q/H435R/Y436Y/K447del

SEQ ID NO: 701 - protein, 392 aa, synthetic construct
  source 1..392: note = XENP40364 Chain 2 - mouse_IL18_3CS_(GGGGS)1_Fc(216)_IgG1_pI(-)_Isosteric_A_C220 S/PVA_/S267K/L368D/K370S/K447del
NFGRLHSTTAVIRNINDQVLFVDKRQPVFEDMTDIDQSASEPQTRLIIYMYKDSEVRGLAVTLSVKDSKMSTLSSKNKIISFEEMDPPENIDDIQSDLIFFQKRVPGHNKMEFESSLYEGHFLASQKEDDAFKLILKKKDENGDKSVMFTLTNLHQSGGGGSEPKSSDKTHTCPPCPAPPVAGPSVFLFPPKPKDTLMISRTPEVTCVVVDVKHEDPEVKFNWYVDGVEVHNAKTKPREEEYNSTYRVVSVLTVLHQDWLNGKEYKCKVSNKALPAPIEKTISKAKGQPREPQVYTLPPSREEMTKNQVSLTCDVSGFYPSDIAVEWESDGQPENNYKTTPPVLDSDGSFFLYSKLTVDKSRWEQGDVFSCSVMHEALHNHYTQKSLSLSPG

SEQ ID NO: 702 - protein, 214 aa, synthetic construct; identical to SEQ ID NO: 295
  source 1..214: note = XENP40364 Chain 3 - SilentFv_L0 Light Chain

SEQ ID NO: 703 - protein, 444 aa, synthetic construct; identical to SEQ ID NO: 386
  source 1..444: note = XENP40617 Chain 1 - SilentFv_H0_Fc(216)_IgG1_/PVA_/S267K/S364K/E357Q/H435R/Y436 Y/K447del

SEQ ID NO: 704 - protein, 387 aa, synthetic construct
  source 1..387: note = XENP40617 Chain 2 - human_IL18_4CS_E31Q_S38E_Fc(216)_IgG1_pI(-)_Isosteric_A_C22 0S/PVA_/S267K/L368D/K370S/K447del
YFGKLESKLSVIRNLNDQVLFIDQGNRPLFQDMTDSDERDNAPRTIFIISMYKDSQPRGMAVTISVKSEKISTLSSENKIISFKEMNPPDNIKDTKSDIIFFQRSVPGHDNKMQFESSSYEGYFLASEKERDLFKLILKKEDELGDRSIMFTVQNEDEPKSSDKTHTCPPCPAPPVAGPSVFLFPPKPKDTLMISRTPEVTCVVVDVKHEDPEVKFNWYVDGVEVHNAKTKPREEEYNSTYRVVSVLTVLHQDWLNGKEYKCKVSNKALPAPIEKTISKAKGQPREPQVYTLPPSREEMTKNQVSLTCDVSGFYPSDIAVEWESDGQPENNYKTTPPVLDSDGSFFLYSKLTVDKSRWEQGDVFSCSVMHEALHNHYTQKSLSLSPG

SEQ ID NO: 705 - protein, 214 aa, synthetic construct; identical to SEQ ID NO: 295
  source 1..214: note = XENP40617 Chain 3 - SilentFv_L0 Light Chain

SEQ ID NO: 706 - protein, 444 aa, synthetic construct; identical to SEQ ID NO: 386
  source 1..444: note = XENP40618 Chain 1 - SilentFv_H0_Fc(216)_IgG1_/PVA_/S267K/S364K/E357Q/H435R/Y436 Y/K447del

SEQ ID NO: 707 - protein, 387 aa, synthetic construct
  source 1..387: note = XENP40618 Chain 2 - human_IL18_4CS_E31Q_S38L_Fc(216)_IgG1_pI(-)_Isosteric_A_C22 0S/PVA_/S267K/L368D/K370S/K447del
YFGKLESKLSVIRNLNDQVLFIDQGNRPLFQDMTDSDLRDNAPRTIFIISMYKDSQPRGMAVTISVKSEKISTLSSENKIISFKEMNPPDNIKDTKSDIIFFQRSVPGHDNKMQFESSSYEGYFLASEKERDLFKLILKKEDELGDRSIMFTVQNEDEPKSSDKTHTCPPCPAPPVAGPSVFLFPPKPKDTLMISRTPEVTCVVVDVKHEDPEVKFNWYVDGVEVHNAKTKPREEEYNSTYRVVSVLTVLHQDWLNGKEYKCKVSNKALPAPIEKTISKAKGQPREPQVYTLPPSREEMTKNQVSLTCDVSGFYPSDIAVEWESDGQPENNYKTTPPVLDSDGSFFLYSKLTVDKSRWEQGDVFSCSVMHEALHNHYTQKSLSLSPG

SEQ ID NO: 708 - protein, 214 aa, synthetic construct; identical to SEQ ID NO: 295
  source 1..214: note = XENP40618 Chain 3 - SilentFv_L0 Light Chain

SEQ ID NO: 709 - protein, 444 aa, synthetic construct; identical to SEQ ID NO: 386
  source 1..444: note = XENP40619 Chain 1 - SilentFv_H0_Fc(216)_IgG1_/PVA_/S267K/S364K/E357Q/H435R/Y436 Y/K447del

SEQ ID NO: 710 - protein, 387 aa, synthetic construct
  source 1..387: note = XENP40619 Chain 2 - human_IL18_4CS_E31Q_S38I_Fc(216)_IgG1_pI(-)_Isosteric_A_C22 0S/PVA_/S267K/L368D/K370S/K447del
YFGKLESKLSVIRNLNDQVLFIDQGNRPLFQDMTDSDIRDNAPRTIFIISMYKDSQPRGMAVTISVKSEKISTLSSENKIISFKEMNPPDNIKDTKSDIIFFQRSVPGHDNKMQFESSSYEGYFLASEKERDLFKLILKKEDELGDRSIMFTVQNEDEPKSSDKTHTCPPCPAPPVAGPSVFLFPPKPKDTLMISRTPEVTCVVVDVKHEDPEVKFNWYVDGVEVHNAKTKPREEEYNSTYRVVSVLTVLHQDWLNGKEYKCKVSNKALPAPIEKTISKAKGQPREPQVYTLPPSREEMTKNQVSLTCDVSGFYPSDIAVEWESDGQPENNYKTTPPVLDSDGSFFLYSKLTVDKSRWEQGDVFSCSVMHEALHNHYTQKSLSLSPG

SEQ ID NO: 711 - protein, 214 aa, synthetic construct; identical to SEQ ID NO: 295
  source 1..214: note = XENP40619 Chain 3 - SilentFv_L0 Light Chain

SEQ ID NO: 712 - protein, 444 aa, synthetic construct; identical to SEQ ID NO: 386
  source 1..444: note = XENP40620 Chain 1 - SilentFv_H0_Fc(216)_IgG1_/PVA_/S267K/S364K/E357Q/H435R/Y436 Y/K447del

SEQ ID NO: 713 - protein, 387 aa, synthetic construct
  source 1..387: note = XENP40620 Chain 2 - human_IL18_4CS_E31Q_S38V_Fc(216)_IgG1_pI(-)_Isosteric_A_C22 0S/PVA_/S267K/L368D/K370S/K447del
YFGKLESKLSVIRNLNDQVLFIDQGNRPLFQDMTDSDVRDNAPRTIFIISMYKDSQPRGMAVTISVKSEKISTLSSENKIISFKEMNPPDNIKDTKSDIIFFQRSVPGHDNKMQFESSSYEGYFLASEKERDLFKLILKKEDELGDRSIMFTVQNEDEPKSSDKTHTCPPCPAPPVAGPSVFLFPPKPKDTLMISRTPEVTCVVVDVKHEDPEVKFNWYVDGVEVHNAKTKPREEEYNSTYRVVSVLTVLHQDWLNGKEYKCKVSNKALPAPIEKTISKAKGQPREPQVYTLPPSREEMTKNQVSLTCDVSGFYPSDIAVEWESDGQPENNYKTTPPVLDSDGSFFLYSKLTVDKSRWEQGDVFSCSVMHEALHNHYTQKSLSLSPG

SEQ ID NO: 714 - protein, 214 aa, synthetic construct; identical to SEQ ID NO: 295
  source 1..214: note = XENP40620 Chain 3 - SilentFv_L0 Light Chain

SEQ ID NO: 715 - protein, 444 aa, synthetic construct; identical to SEQ ID NO: 386
  source 1..444: note = XENP40621 Chain 1 - SilentFv_H0_Fc(216)_IgG1_/PVA_/S267K/S364K/E357Q/H435R/Y436 Y/K447del

SEQ ID NO: 716 - protein, 387 aa, synthetic construct
  source 1..387: note = XENP40621 Chain 2 - human_IL18_4CS_E31Q_S68N_Fc(216)_IgG1_pI(-)_Isosteric_A_C22 0S/PVA_/S267K/L368D/K370S/K447del
YFGKLESKLSVIRNLNDQVLFIDQGNRPLFQDMTDSDSRDNAPRTIFIISMYKDSQPRGMAVTISVKNEKISTLSSENKIISFKEMNPPDNIKDTKSDIIFFQRSVPGHDNKMQFESSSYEGYFLASEKERDLFKLILKKEDELGDRSIMFTVQNEDEPKSSDKTHTCPPCPAPPVAGPSVFLFPPKPKDTLMISRTPEVTCVVVDVKHEDPEVKFNWYVDGVEVHNAKTKPREEEYNSTYRVVSVLTVLHQDWLNGKEYKCKVSNKALPAPIEKTISKAKGQPREPQVYTLPPSREEMTKNQVSLTCDVSGFYPSDIAVEWESDGQPENNYKTTPPVLDSDGSFFLYSKLTVDKSRWEQGDVFSCSVMHEALHNHYTQKSLSLSPG

SEQ ID NO: 717 - protein, 214 aa, synthetic construct; identical to SEQ ID NO: 295
  source 1..214: note = XENP40621 Chain 3 - SilentFv_L0 Light Chain

SEQ ID NO: 718 - protein, 444 aa, synthetic construct; identical to SEQ ID NO: 386
  source 1..444: note = XENP40622 Chain 1 - SilentFv_H0_Fc(216)_IgG1_/PVA_/S267K/S364K/E357Q/H435R/Y436 Y/K447del

SEQ ID NO: 719 - protein, 387 aa, synthetic construct
  source 1..387: note = XENP40622 Chain 2 - human_IL18_4CS_E31Q_S68E_Fc(216)_IgG1_pI(-)_Isosteric_A_C22 0S/PVA_/S267K/L368D/K370S/K447del
YFGKLESKLSVIRNLNDQVLFIDQGNRPLFQDMTDSDSRDNAPRTIFIISMYKDSQPRGMAVTISVKEEKISTLSSENKIISFKEMNPPDNIKDTKSDIIFFQRSVPGHDNKMQFESSSYEGYFLASEKERDLFKLILKKEDELGDRSIMFTVQNEDEPKSSDKTHTCPPCPAPPVAGPSVFLFPPKPKDTLMISRTPEVTCVVVDVKHEDPEVKFNWYVDGVEVHNAKTKPREEEYNSTYRVVSVLTVLHQDWLNGKEYKCKVSNKALPAPIEKTISKAKGQPREPQVYTLPPSREEMTKNQVSLTCDVSGFYPSDIAVEWESDGQPENNYKTTPPVLDSDGSFFLYSKLTVDKSRWEQGDVFSCSVMHEALHNHYTQKSLSLSPG

SEQ ID NO: 720 - protein, 214 aa, synthetic construct; identical to SEQ ID NO: 295
  source 1..214: note = XENP40622 Chain 3 - SilentFv_L0 Light Chain

SEQ ID NO: 721 - protein, 444 aa, synthetic construct; identical to SEQ ID NO: 386
  source 1..444: note = XENP40623 Chain 1 - SilentFv_H0_Fc(216)_IgG1_/PVA_/S267K/S364K/E357Q/H435R/Y436 Y/K447del

SEQ ID NO: 722 - protein, 387 aa, synthetic construct
  source 1..387: note = XENP40623 Chain 2 - human_IL18_4CS_E31Q_S68Q_Fc(216)_IgG1_pI(-)_Isosteric_A_C22 0S/PVA_/S267K/L368D/K370S/K447del
YFGKLESKLSVIRNLNDQVLFIDQGNRPLFQDMTDSDSRDNAPRTIFIISMYKDSQPRGMAVTISVKQEKISTLSSENKIISFKEMNPPDNIKDTKSDIIFFQRSVPGHDNKMQFESSSYEGYFLASEKERDLFKLILKKEDELGDRSIMFTVQNEDEPKSSDKTHTCPPCPAPPVAGPSVFLFPPKPKDTLMISRTPEVTCVVVDVKHEDPEVKFNWYVDGVEVHNAKTKPREEEYNSTYRVVSVLTVLHQDWLNGKEYKCKVSNKALPAPIEKTISKAKGQPREPQVYTLPPSREEMTKNQVSLTCDVSGFYPSDIAVEWESDGQPENNYKTTPPVLDSDGSFFLYSKLTVDKSRWEQGDVFSCSVMHEALHNHYTQKSLSLSPG

SEQ ID NO: 723 - protein, 214 aa, synthetic construct; identical to SEQ ID NO: 295
  source 1..214: note = XENP40623 Chain 3 - SilentFv_L0 Light Chain

SEQ ID NO: 724 - protein, 444 aa, synthetic construct; identical to SEQ ID NO: 386
  source 1..444: note = XENP40624 Chain 1 - SilentFv_H0_Fc(216)_IgG1_/PVA_/S267K/S364K/E357Q/H435R/Y436 Y/K447del

SEQ ID NO: 725 - protein, 387 aa, synthetic construct
  source 1..387: note = XENP40624 Chain 2 - human_IL18_4CS_E31Q_S76C_Fc(216)_IgG1_pI(-)_Isosteric_A_C22 0S/PVA_/S267K/L368D/K370S/K447del
YFGKLESKLSVIRNLNDQVLFIDQGNRPLFQDMTDSDSRDNAPRTIFIISMYKDSQPRGMAVTISVKSEKISTLSCENKIISFKEMNPPDNIKDTKSDIIFFQRSVPGHDNKMQFESSSYEGYFLASEKERDLFKLILKKEDELGDRSIMFTVQNEDEPKSSDKTHTCPPCPAPPVAGPSVFLFPPKPKDTLMISRTPEVTCVVVDVKHEDPEVKFNWYVDGVEVHNAKTKPREEEYNSTYRVVSVLTVLHQDWLNGKEYKCKVSNKALPAPIEKTISKAKGQPREPQVYTLPPSREEMTKNQVSLTCDVSGFYPSDIAVEWESDGQPENNYKTTPPVLDSDGSFFLYSKLTVDKSRWEQGDVFSCSVMHEALHNHYTQKSLSLSPG

SEQ ID NO: 726 - protein, 214 aa, synthetic construct; identical to SEQ ID NO: 295
  source 1..214: note = XENP40624 Chain 3 - SilentFv_L0 Light Chain

SEQ ID NO: 727 - protein, 444 aa, synthetic construct; identical to SEQ ID NO: 386
  source 1..444: note = XENP40625 Chain 1 - SilentFv_H0_Fc(216)_IgG1_/PVA_/S267K/S364K/E357Q/H435R/Y436 Y/K447del

SEQ ID NO: 728 - protein, 387 aa, synthetic construct
  source 1..387: note = XENP40625 Chain 2 - human_IL18_4CS_E31Q_S127D_Fc(216)_IgG1_pI(-)_Isosteric_A_C2 20S/PVA_/S267K/L368D/K370S/K447del
YFGKLESKLSVIRNLNDQVLFIDQGNRPLFQDMTDSDSRDNAPRTIFIISMYKDSQPRGMAVTISVKSEKISTLSSENKIISFKEMNPPDNIKDTKSDIIFFQRSVPGHDNKMQFESSSYEGYFLADEKERDLFKLILKKEDELGDRSIMFTVQNEDEPKSSDKTHTCPPCPAPPVAGPSVFLFPPKPKDTLMISRTPEVTCVVVDVKHEDPEVKFNWYVDGVEVHNAKTKPREEEYNSTYRVVSVLTVLHQDWLNGKEYKCKVSNKALPAPIEKTISKAKGQPREPQVYTLPPSREEMTKNQVSLTCDVSGFYPSDIAVEWESDGQPENNYKTTPPVLDSDGSFFLYSKLTVDKSRWEQGDVFSCSVMHEALHNHYTQKSLSLSPG

SEQ ID NO: 729 - protein, 214 aa, synthetic construct; identical to SEQ ID NO: 295
  source 1..214: note = XENP40625 Chain 3 - SilentFv_L0 Light Chain

SEQ ID NO: 730 - protein, 444 aa, synthetic construct; identical to SEQ ID NO: 386
  source 1..444: note = XENP40626 Chain 1 - SilentFv_H0_Fc(216)_IgG1_/PVA_/S267K/S364K/E357Q/H435R/Y436 Y/K447del

SEQ ID NO: 731 - protein, 387 aa, synthetic construct
  source 1..387: note = XENP40626 Chain 2 - human_IL18_4CS_E31Q_S127E_Fc(216)_IgG1_pI(-)_Isosteric_A_C2 20S/PVA_/S267K/L368D/K370S/K447del
YFGKLESKLSVIRNLNDQVLFIDQGNRPLFQDMTDSDSRDNAPRTIFIISMYKDSQPRGMAVTISVKSEKISTLSSENKIISFKEMNPPDNIKDTKSDIIFFQRSVPGHDNKMQFESSSYEGYFLAEEKERDLFKLILKKEDELGDRSIMFTVQNEDEPKSSDKTHTCPPCPAPPVAGPSVFLFPPKPKDTLMISRTPEVTCVVVDVKHEDPEVKFNWYVDGVEVHNAKTKPREEEYNSTYRVVSVLTVLHQDWLNGKEYKCKVSNKALPAPIEKTISKAKGQPREPQVYTLPPSREEMTKNQVSLTCDVSGFYPSDIAVEWESDGQPENNYKTTPPVLDSDGSFFLYSKLTVDKSRWEQGDVFSCSVMHEALHNHYTQKSLSLSPG

SEQ ID NO: 732 - protein, 214 aa, synthetic construct; identical to SEQ ID NO: 295
  source 1..214: note = XENP40626 Chain 3 - SilentFv_L0 Light Chain

SEQ ID NO: 733 - protein, 444 aa, synthetic construct; identical to SEQ ID NO: 386
  source 1..444: note = XENP40627 Chain 1 - SilentFv_H0_Fc(216)_IgG1_/PVA_/S267K/S364K/E357Q/H435R/Y436 Y/K447del

SEQ ID NO: 734 - protein, 387 aa, synthetic construct
  source 1..387: note = XENP40627 Chain 2 - human_IL18_4CS_D23N_E31Q_R27Q_Fc(216)_IgG1_pI(-)_Isosteric_ A_C220S/PVA_/S267K/L368D/K370S/K447del
YFGKLESKLSVIRNLNDQVLFINQGNQPLFQDMTDSDSRDNAPRTIFIISMYKDSQPRGMAVTISVKSEKISTLSSENKIISFKEMNPPDNIKDTKSDIIFFQRSVPGHDNKMQFESSSYEGYFLASEKERDLFKLILKKEDELGDRSIMFTVQNEDEPKSSDKTHTCPPCPAPPVAGPSVFLFPPKPKDTLMISRTPEVTCVVVDVKHEDPEVKFNWYVDGVEVHNAKTKPREEEYNSTYRVVSVLTVLHQDWLNGKEYKCKVSNKALPAPIEKTISKAKGQPREPQVYTLPPSREEMTKNQVSLTCDVSGFYPSDIAVEWESDGQPENNYKTTPPVLDSDGSFFLYSKLTVDKSRWEQGDVFSCSVMHEALHNHYTQKSLSLSPG

SEQ ID NO: 735 - protein, 214 aa, synthetic construct; identical to SEQ ID NO: 295
  source 1..214: note = XENP40627 Chain 3 - SilentFv_L0 Light Chain

SEQ ID NO: 736 - protein, 444 aa, synthetic construct; identical to SEQ ID NO: 386
  source 1..444: note = XENP40628 Chain 1 - SilentFv_H0_Fc(216)_IgG1_/PVA_/S267K/S364K/E357Q/H435R/Y436 Y/K447del

SEQ ID NO: 737 - protein, 387 aa, synthetic construct
  source 1..387: note = XENP40628 Chain 2 - human_IL18_4CS_E31Q_Q56L_T95E_Fc(216)_IgG1_pI(-)_Isosteric_ A_C220S/PVA_/S267K/L368D/K370S/K447del
YFGKLESKLSVIRNLNDQVLFIDQGNRPLFQDMTDSDSRDNAPRTIFIISMYKDSLPRGMAVTISVKSEKISTLSSENKIISFKEMNPPDNIKDEKSDIIFFQRSVPGHDNKMQFESSSYEGYFLASEKERDLFKLILKKEDELGDRSIMFTVQNEDEPKSSDKTHTCPPCPAPPVAGPSVFLFPPKPKDTLMISRTPEVTCVVVDVKHEDPEVKFNWYVDGVEVHNAKTKPREEEYNSTYRVVSVLTVLHQDWLNGKEYKCKVSNKALPAPIEKTISKAKGQPREPQVYTLPPSREEMTKNQVSLTCDVSGFYPSDIAVEWESDGQPENNYKTTPPVLDSDGSFFLYSKLTVDKSRWEQGDVFSCSVMHEALHNHYTQKSLSLSPG

SEQ ID NO: 738 - protein, 214 aa, synthetic construct; identical to SEQ ID NO: 295
  source 1..214: note = XENP40628 Chain 3 - SilentFv_L0 Light Chain

SEQ ID NO: 739 - protein, 444 aa, synthetic construct; identical to SEQ ID NO: 386
  source 1..444: note = XENP40629 Chain 1 - SilentFv_H0_Fc(216)_IgG1_/PVA_/S267K/S364K/E357Q/H435R/Y436 Y/K447del

SEQ ID NO: 740 - protein, 387 aa, synthetic construct
  source 1..387: note = XENP40629 Chain 2 - human_IL18_4CS_E31Q_K96Q_S119L_Fc(216)_IgG1_pI(-)_Isosteric _A_C220S/PVA_/S267K/L368D/K370S/K447del
YFGKLESKLSVIRNLNDQVLFIDQGNRPLFQDMTDSDSRDNAPRTIFIISMYKDSQPRGMAVTISVKSEKISTLSSENKIISFKEMNPPDNIKDTQSDIIFFQRSVPGHDNKMQFESSLYEGYFLASEKERDLFKLILKKEDELGDRSIMFTVQNEDEPKSSDKTHTCPPCPAPPVAGPSVFLFPPKPKDTLMISRTPEVTCVVVDVKHEDPEVKFNWYVDGVEVHNAKTKPREEEYNSTYRVVSVLTVLHQDWLNGKEYKCKVSNKALPAPIEKTISKAKGQPREPQVYTLPPSREEMTKNQVSLTCDVSGFYPSDIAVEWESDGQPENNYKTTPPVLDSDGSFFLYSKLTVDKSRWEQGDVFSCSVMHEALHNHYTQKSLSLSPG

SEQ ID NO: 741 - protein, 214 aa, synthetic construct; identical to SEQ ID NO: 295
  source 1..214: note = XENP40629 Chain 3 - SilentFv_L0 Light Chain

SEQ ID NO: 742 - protein, 444 aa, synthetic construct; identical to SEQ ID NO: 386
  source 1..444: note = XENP40630 Chain 1 - SilentFv_H0_Fc(216)_IgG1_/PVA_/S267K/S364K/E357Q/H435R/Y436 Y/K447del

SEQ ID NO: 743 - protein, 387 aa, synthetic construct
  source 1..387: note = XENP40630 Chain 2 - human_IL18_4CS_E31Q_E141K_I149V_Fc(216)_IgG1_pI(-)_Isosteri c_A_C220S/PVA_/S267K/L368D/K370S/K447del
YFGKLESKLSVIRNLNDQVLFIDQGNRPLFQDMTDSDSRDNAPRTIFIISMYKDSQPRGMAVTISVKSEKISTLSSENKIISFKEMNPPDNIKDTKSDIIFFQRSVPGHDNKMQFESSSYEGYFLASEKERDLFKLILKKKDELGDRSVMFTVQNEDEPKSSDKTHTCPPCPAPPVAGPSVFLFPPKPKDTLMISRTPEVTCVVVDVKHEDPEVKFNWYVDGVEVHNAKTKPREEEYNSTYRVVSVLTVLHQDWLNGKEYKCKVSNKALPAPIEKTISKAKGQPREPQVYTLPPSREEMTKNQVSLTCDVSGFYPSDIAVEWESDGQPENNYKTTPPVLDSDGSFFLYSKLTVDKSRWEQGDVFSCSVMHEALHNHYTQKSLSLSPG

SEQ ID NO: 744 - protein, 214 aa, synthetic construct; identical to SEQ ID NO: 295
  source 1..214: note = XENP40630 Chain 3 - SilentFv_L0 Light Chain

SEQ ID NO: 745 - protein, 444 aa, synthetic construct; identical to SEQ ID NO: 386
  source 1..444: note = XENP40631 Chain 1 - SilentFv_H0_Fc(216)_IgG1_/PVA_/S267K/S364K/E357Q/H435R/Y436 Y/K447del

SEQ ID NO: 746 - protein, 387 aa, synthetic construct
  source 1..387: note = XENP40631 Chain 2 - human_IL18_4CS_E31Q_E141Q_I149V_Fc(216)_IgG1_pI(-)_Isosteri c_A_C220S/PVA_/S267K/L368D/K370S/K447del
YFGKLESKLSVIRNLNDQVLFIDQGNRPLFQDMTDSDSRDNAPRTIFIISMYKDSQPRGMAVTISVKSEKISTLSSENKIISFKEMNPPDNIKDTKSDIIFFQRSVPGHDNKMQFESSSYEGYFLASEKERDLFKLILKKQDELGDRSVMFTVQNEDEPKSSDKTHTCPPCPAPPVAGPSVFLFPPKPKDTLMISRTPEVTCVVVDVKHEDPEVKFNWYVDGVEVHNAKTKPREEEYNSTYRVVSVLTVLHQDWLNGKEYKCKVSNKALPAPIEKTISKAKGQPREPQVYTLPPSREEMTKNQVSLTCDVSGFYPSDIAVEWESDGQPENNYKTTPPVLDSDGSFFLYSKLTVDKSRWEQGDVFSCSVMHEALHNHYTQKSLSLSPG

SEQ ID NO: 747 - protein, 214 aa, synthetic construct; identical to SEQ ID NO: 295
  source 1..214: note = XENP40631 Chain 3 - SilentFv_L0 Light Chain

SEQ ID NO: 748 - protein, 444 aa, synthetic construct; identical to SEQ ID NO: 386
  source 1..444: note = XENP40632 Chain 1 - SilentFv_H0_Fc(216)_IgG1_/PVA_/S267K/S364K/E357Q/H435R/Y436 Y/K447del

SEQ ID NO: 749 - protein, 387 aa, synthetic construct
  source 1..387: note = XENP40632 Chain 2 - human_IL18_4CS_S7P_E31Q_S50Y_Fc(216)_IgG1_pI(-)_Isosteric_A _C220S/PVA_/S267K/L368D/K370S/K447del
YFGKLEPKLSVIRNLNDQVLFIDQGNRPLFQDMTDSDSRDNAPRTIFIIYMYKDSQPRGMAVTISVKSEKISTLSSENKIISFKEMNPPDNIKDTKSDIIFFQRSVPGHDNKMQFESSSYEGYFLASEKERDLFKLILKKEDELGDRSIMFTVQNEDEPKSSDKTHTCPPCPAPPVAGPSVFLFPPKPKDTLMISRTPEVTCVVVDVKHEDPEVKFNWYVDGVEVHNAKTKPREEEYNSTYRVVSVLTVLHQDWLNGKEYKCKVSNKALPAPIEKTISKAKGQPREPQVYTLPPSREEMTKNQVSLTCDVSGFYPSDIAVEWESDGQPENNYKTTPPVLDSDGSFFLYSKLTVDKSRWEQGDVFSCSVMHEALHNHYTQKSLSLSPG

SEQ ID NO: 750 - protein, 214 aa, synthetic construct; identical to SEQ ID NO: 295
  source 1..214: note = XENP40632 Chain 3 - SilentFv_L0 Light Chain

SEQ ID NO: 751 - protein, 444 aa, synthetic construct; identical to SEQ ID NO: 386
  source 1..444: note = XENP40657 Chain 1 - SilentFv_H0_Fc(216)_IgG1_/PVA_/S267K/S364K/E357Q/H435R/Y436 Y/K447del

SEQ ID NO: 752 - protein, 387 aa, synthetic construct; identical to SEQ ID NO: 318
  source 1..387: note = XENP40657 Chain 2 - human_IL18_4CS_D35N_Fc(216)_IgG1_pI(-)_Isosteric_A_C220S/PV A_/S267K/L368D/K370S/K447del

SEQ ID NO: 753 - protein, 214 aa, synthetic construct; identical to SEQ ID NO: 295
  source 1..214: note = XENP40657 Chain 3 - SilentFv_L0 Light Chain

SEQ ID NO: 754 - protein, 444 aa, synthetic construct; identical to SEQ ID NO: 386
  source 1..444: note = XENP40658 Chain 1 - SilentFv_H0_Fc(216)_IgG1_/PVA_/S267K/S364K/E357Q/H435R/Y436 Y/K447del

SEQ ID NO: 755 - protein, 387 aa, synthetic construct; identical to SEQ ID NO: 321
  source 1..387: note = XENP40658 Chain 2 - human_IL18_4CS_D37N_Fc(216)_IgG1_pI(-)_Isosteric_A_C220S/PV A_/S267K/L368D/K370S/K447del

SEQ ID NO: 756 - protein, 214 aa, synthetic construct; identical to SEQ ID NO: 295
  source 1..214: note = XENP40658 Chain 3 - SilentFv_L0 Light Chain

SEQ ID NO: 757 - protein, 444 aa, synthetic construct; identical to SEQ ID NO: 386
  source 1..444: note = XENP40659 Chain 1 - SilentFv_H0_Fc(216)_IgG1_/PVA_/S267K/S364K/E357Q/H435R/Y436 Y/K447del

SEQ ID NO: 758 - protein, 387 aa, synthetic construct; identical to SEQ ID NO: 327
  source 1..387: note = XENP40659 Chain 2 - human_IL18_4CS_N41Q_Fc(216)_IgG1_pI(-)_Isosteric_A_C220S/PV A_/S267K/L368D/K370S/K447del

SEQ ID NO: 759 - protein, 214 aa, synthetic construct; identical to SEQ ID NO: 295
  source 1..214: note = XENP40659 Chain 3 - SilentFv_L0 Light Chain

SEQ ID NO: 760 - protein, 444 aa, synthetic construct; identical to SEQ ID NO: 386
  source 1..444: note = XENP40660 Chain 1 - SilentFv_H0_Fc(216)_IgG1_/PVA_/S267K/S364K/E357Q/H435R/Y436 Y/K447del

SEQ ID NO: 761 - protein, 387 aa, synthetic construct; identical to SEQ ID NO: 333
  source 1..387: note = XENP40660 Chain 2 - human_IL18_4CS_K53H_Fc(216)_IgG1_pI(-)_Isosteric_A_C220S/PV A_/S267K/L368D/K370S/K447del

SEQ ID NO: 762 - protein, 214 aa, synthetic construct; identical to SEQ ID NO: 295
  source 1..214: note = XENP40660 Chain 3 - SilentFv_L0 Light Chain

SEQ ID NO: 763 - protein, 444 aa, synthetic construct; identical to SEQ ID NO: 386
  source 1..444: note = XENP40661 Chain 1 - SilentFv_H0_Fc(216)_IgG1_/PVA_/S267K/S364K/E357Q/H435R/Y436 Y/K447del

SEQ ID NO: 764 - protein, 387 aa, synthetic construct; identical to SEQ ID NO: 339
  source 1..387: note = XENP40661 Chain 2 - human_IL18_4CS_K53E_Fc(216)_IgG1_pI(-)_Isosteric_A_C220S/PV A_/S267K/L368D/K370S/K447del

SEQ ID NO: 765 - protein, 214 aa, synthetic construct; identical to SEQ ID NO: 295
  source 1..214: note = XENP40661 Chain 3 - SilentFv_L0 Light Chain

SEQ ID NO: 766 - protein, 444 aa, synthetic construct; identical to SEQ ID NO: 386
  source 1..444: note = XENP40662 Chain 1 - SilentFv_H0_Fc(216)_IgG1_/PVA_/S267K/S364K/E357Q/H435R/Y436 Y/K447del

SEQ ID NO: 767 - protein, 387 aa, synthetic construct; identical to SEQ ID NO: 342
  source 1..387: note = XENP40662 Chain 2 - human_IL18_4CS_K53Q_Fc(216)_IgG1_pI(-)_Isosteric_A_C220S/PV A_/S267K/L368D/K370S/K447del

SEQ ID NO: 768 - protein, 214 aa, synthetic construct; identical to SEQ ID NO: 295
  source 1..214: note = XENP40662 Chain 3 - SilentFv_L0 Light Chain

SEQ ID NO: 769 - protein, 444 aa, synthetic construct; identical to SEQ ID NO: 386
  source 1..444: note = XENP40663 Chain 1 - SilentFv_H0_Fc(216)_IgG1_/PVA_/S267K/S364K/E357Q/H435R/Y436 Y/K447del

SEQ ID NO: 770 - protein, 387 aa, synthetic construct; identical to SEQ ID NO: 345
  source 1..387: note = XENP40663 Chain 2 - human_IL18_4CS_K53A_Fc(216)_IgG1_pI(-)_Isosteric_A_C220S/PV A_/S267K/L368D/K370S/K447del

SEQ ID NO: 771 - protein, 214 aa, synthetic construct; identical to SEQ ID NO: 295
  source 1..214: note = XENP40663 Chain 3 - SilentFv_L0 Light Chain

SEQ ID NO: 772 - protein, 387 aa, synthetic construct; identical to SEQ ID NO: 459
  source 1..387: note = XENP40686 Chain 1 - hu_IL18_4CS_S10C_E31Q_N155C_Fc(216)_IgG1_pI(-)_Isosteric_A_ C220S/PVA_/S267K/L368D/K370S/K447del

SEQ ID NO: 773 - protein, 443 aa, synthetic construct
  source 1..443: note = XENP40686 Chain 2 - DP47GS_H1_IgG1_PVA_/S267K/S364K/E357Q/K447del
EVQLLESGGGLVQPGGSLRLSCAASGFTFSSYAMSWVRQAPGKGLEWVSAISGSGGSTYYADSVKGRFTISRDNSKNTLYLQMNSLRAEDTAVYYCAKGSGFDYWGQGTLVTVSSASTKGPSVFPLAPSSKSTSGGTAALGCLVKDYFPEPVTVSWNSGALTSGVHTFPAVLQSSGLYSLSSVVTVPSSSLGTQTYICNVNHKPSNTKVDKKVEPKSCDKTHTCPPCPAPPVAGPSVFLFPPKPKDTLMISRTPEVTCVVVDVKHEDPEVKFNWYVDGVEVHNAKTKPREEQYNSTYRVVSVLTVLHQDWLNGKEYKCKVSNKALPAPIEKTISKAKGQPREPQVYTLPPSREQMTKNQVKLTCLVKGFYPSDIAVEWESNGQPENNYKTTPPVLDSDGSFFLYSKLTVDKSRWQQGNVFSCSVMHEALHNHYTQKSLSLSPG

SEQ ID NO: 774 - protein, 215 aa, synthetic construct
  source 1..215: note = XENP40686 Chain 3 - DP47GS _L1 Light Chain
EIVLTQSPGTLSLSPGERATLSCRASQSVSSSYLAWYQQKPGQAPRLLIYGASSRATGIPDRFSGSGSGTDFTLTISRLEPEDFAVYYCQQYGSSPLTFGQGTKVEIKRTVAAPSVFIFPPSDEQLKSGTASVVCLLNNFYPREAKVQWKVDNALQSGNSQESVTEQDSKDSTYSLSSTLTLSKADYEKHKVYACEVTHQGLSSPVTKSFNRGEC

SEQ ID NO: 775 - protein, 10 aa, synthetic construct
EAAAKEAAAK

SEQ ID NO: 776 - protein, 20 aa, synthetic construct
EAAAKEPKSSDKTHTCPPCP

SEQ ID NO: 777 - skipped

SEQ ID NO: 778 - protein, 5 aa, synthetic construct
GSGGS

SEQ ID NO: 779 - protein, 4 aa, synthetic construct
GGGS

SEQ ID NO: 780 - protein, 5 aa, synthetic construct
GGGGS

SEQ ID NO: 781 - protein, 444 aa, synthetic construct; identical to SEQ ID NO: 386
  source 1..444: note = XENP40259 Chain 1 - SilentFv_H0_Fc(216)_IgG1_PVA_/S267K/S364K/E357Q/H435R/Y436Y /K447del

SEQ ID NO: 782 - protein, 15 aa, synthetic construct
  source 1..15: note = Useful domain linkers "full hinge"
EPKSCDKTHTCPPCP

SEQ ID NO: 783 - protein, 5 aa, synthetic construct
  source 1..5: note = Useful domain linkers "upper half hinge"
EPKSC

SEQ ID NO: 784 - protein, 15 aa, synthetic construct
  source 1..15: note = Useful domain linkers "flex upper half hinge"
EPKSCGGGGSGGGGS

SEQ ID NO: 785 - protein, 15 aa, synthetic construct
  source 1..15: note = Useful domain linkers "charged upper half hinge1"
EPKSCGKPGSGKPGS

SEQ ID NO: 786 - protein, 10 aa, synthetic construct
  source 1..10: note = Useful domain linkers "charged upper half hinge2"
EPKSCGKPGS

SEQ ID NO: 787 - protein, 216 aa, synthetic construct
  source 1..216: note = Heterodimeric Fc Backbone 13 monomer 1
APPVAGPSVFLFPPKPKDTLMISRTPEVTCVVVDVKHEDPEVKFNWYVDGVEVHNAKTKPREEEYNSTYRVVSVLTVLHQDWLNGKEYKCKVSNKALPAPIEKTISKAKGQPREPQVYTLPPSREEMTKNQVSLTCDVSGFYPSDIAVEWESDGQPENNYKTTPPVLDSDGSFFLYSKLTVDKSRWEQGDVFSCSVLHEALHAHYTQKSLSLSPGK

SEQ ID NO: 788 - protein, 216 aa, synthetic construct
  source 1..216: note = Heterodimeric Fc Backbone 13 monomer 2
APPVAGPSVFLFPPKPKDTLMISRTPEVTCVVVDVKHEDPEVKFNWYVDGVEVHNAKTKPREEQYNSTYRVVSVLTVLHQDWLNGKEYKCKVSNKALPAPIEKTISKAKGQPREPQVYTLPPSREQMTKNQVKLTCLVKGFYPSDIAVEWESNGQPENNYKTTPPVLDSDGSFFLYSKLTVDKSRWQQGNVFSCSVLHEALHAHYTQKSLSLSPGK

SEQ ID NO: 789 - protein, 216 aa, synthetic construct
  source 1..216: note = Heterodimeric Fc Backbone 14 monomer 1
APPVAGPSVFLFPPKPKDTLMISRTPEVTCVVVDVKHEDPEVKFNWYVDGVEVHNAKTKPREEEYNSTYRVVSVLTVLHQDWLNGKEYKCKVSNKALPAPIEKTISKAKGQPREPQVYTLPPSRDELTKNQVSLTCDVSGFYPSDIAVEWESDGQPENNYKTTPPVLDSDGSFFLYSKLTVDKSRWEQGDVFSCSVLHEALHAHYTQKSLSLSPGK

SEQ ID NO: 790 - protein, 216 aa, synthetic construct
  source 1..216: note = Heterodimeric Fc Backbone 14 monomer 2
APPVAGPSVFLFPPKPKDTLMISRTPEVTCVVVDVKHEDPEVKFNWYVDGVEVHNAKTKPREEQYNSTYRVVSVLTVLHQDWLNGKEYKCKVSNKALPAPIEKTISKAKGQPREPQVYTLPPSRDQLTKNQVKLTCLVKGFYPSDIAVEWESNGQPENNYKTTPPVLDSDGSFFLYSKLTVDKSRWQQGNVFSCSVLHEALHAHYTQKSLSLSPGK

SEQ ID NO: 791 - protein, 216 aa, synthetic construct
  source 1..216: note = Heterodimeric Fc Backbone 15 monomer 1
APPVAGPSVFLFPPKPKDTLMISRTPEVTCVVVDVKHEDPEVKFNWYVDGVEVHNAKTKPREEEYNSTYRVVSVLTVLHQDWLNGKEYKCKVSNKALPAPIEKTISKAKGQPREPQVYTLPPSREEMTKNQVSLTCDVSGFYPSDIAVEWESDGQPENNYKTTPPVLDSDGSFFLYSKLTVDKSRWEQGDVFSCSVMHEALHNRFTQKSLSLSPGK

SEQ ID NO: 792 - protein, 216 aa, synthetic construct; identical to SEQ ID NO: 53
  source 1..216: note = Heterodimeric Fc Backbone 15 monomer 2

SEQ ID NO: 793 - protein, 216 aa, synthetic construct; identical to SEQ ID NO: 52
  source 1..216: note = Heterodimeric Fc Backbone 16 monomer 1

SEQ ID NO: 794 - protein, 216 aa, synthetic construct
  source 1..216: note = Heterodimeric Fc Backbone 16 monomer 2
APPVAGPSVFLFPPKPKDTLMISRTPEVTCVVVDVKHEDPEVKFNWYVDGVEVHNAKTKPREEQYNSTYRVVSVLTVLHQDWLNGKEYKCKVSNKALPAPIEKTISKAKGQPREPQVYTLPPSREQMTKNQVKLTCLVKGFYPSDIAVEWESNGQPENNYKTTPPVLDSDGSFFLYSKLTVDKSRWQQGNVFSCSVMHEALHNRFTQKSLSLSPGK

SEQ ID NO: 795 - protein, 216 aa, synthetic construct
  source 1..216: note = Heterodimeric Fc Backbone 17 monomer 1
APPVAGPSVFLFPPKPKDTLMISRTPEVTCVVVDVKHEDPEVKFNWYVDGVEVHNAKTKPREEEYNSTYRVVSVLTVLHQDWLNGKEYKCKVSNKALPAPIEKTISKAKGQPREPQVYTLPPSREEMTKNQVSLTCDVSGFYPSDIAVEWESDGQPENNYKTTPPVLDSDGSFFLYSKLTVDKSRWEQGDVFSCSVLHEALHSRFTQKSLSLSPGK

SEQ ID NO: 796 - protein, 216 aa, synthetic construct; identical to SEQ ID NO: 73
  source 1..216: note = Heterodimeric Fc Backbone 17 monomer 2

SEQ ID NO: 797 - protein, 216 aa, synthetic construct; identical to SEQ ID NO: 72
  source 1..216: note = Heterodimeric Fc Backbone 18 monomer 1

SEQ ID NO: 798 - protein, 216 aa, synthetic construct
  source 1..216: note = Heterodimeric Fc Backbone 18 monomer 2
APPVAGPSVFLFPPKPKDTLMISRTPEVTCVVVDVKHEDPEVKFNWYVDGVEVHNAKTKPREEQYNSTYRVVSVLTVLHQDWLNGKEYKCKVSNKALPAPIEKTISKAKGQPREPQVYTLPPSREQMTKNQVKLTCLVKGFYPSDIAVEWESNGQPENNYKTTPPVLDSDGSFFLYSKLTVDKSRWQQGNVFSCSVLHEALHSRFTQKSLSLSPGK

SEQ ID NO: 799 - protein, 156 aa, synthetic construct
  source 1..156: note = IL18-4CS_D157del or D157
YFGKLESKLSVIRNLNDQVLFIDQGNRPLFEDMTDSDSRDNAPRTIFIISMYKDSQPRGMAVTISVKSEKISTLSSENKIISFKEMNPPDNIKDTKSDIIFFQRSVPGHDNKMQFESSSYEGYFLASEKERDLFKLILKKEDELGDRSIMFTVQNE

SEQ ID NO: 800 - protein, 157 aa, synthetic construct
  source 1..157: note = IL18-4CS_D157S
YFGKLESKLSVIRNLNDQVLFIDQGNRPLFEDMTDSDSRDNAPRTIFIISMYKDSQPRGMAVTISVKSEKISTLSSENKIISFKEMNPPDNIKDTKSDIIFFQRSVPGHDNKMQFESSSYEGYFLASEKERDLFKLILKKEDELGDRSIMFTVQNES

SEQ ID NO: 801 - protein, 157 aa, synthetic construct
  source 1..157: note = IL18-4CS_D157A
YFGKLESKLSVIRNLNDQVLFIDQGNRPLFEDMTDSDSRDNAPRTIFIISMYKDSQPRGMAVTISVKSEKISTLSSENKIISFKEMNPPDNIKDTKSDIIFFQRSVPGHDNKMQFESSSYEGYFLASEKERDLFKLILKKEDELGDRSIMFTVQNEA

SEQ ID NO: 802 - protein, 156 aa, synthetic construct
  source 1..156: note = human_IL18_4CS_Y1F
FFGKLESKLSVIRNLNDQVLFIDQGNRPLFEDMTDSDSRDNAPRTIFIISMYKDSQPRGMAVTISVKSEKISTLSSENKIISFKEMNPPDNIKDTKSDIIFFQRSVPGHDNKMQFESSSYEGYFLASEKERDLFKLILKKEDELGDRSIMFTVQND

SEQ ID NO: 803 - protein, 156 aa, synthetic construct
  source 1..156: note = human_IL18_4CS_Y1H
HFGKLESKLSVIRNLNDQVLFIDQGNRPLFEDMTDSDSRDNAPRTIFIISMYKDSQPRGMAVTISVKSEKISTLSSENKIISFKEMNPPDNIKDTKSDIIFFQRSVPGHDNKMQFESSSYEGYFLASEKERDLFKLILKKEDELGDRSIMFTVQND

SEQ ID NO: 804 - protein, 156 aa, synthetic construct
  source 1..156: note = human_IL18_4CS_E6A
YFGKLASKLSVIRNLNDQVLFIDQGNRPLFEDMTDSDSRDNAPRTIFIISMYKDSQPRGMAVTISVKSEKISTLSSENKIISFKEMNPPDNIKDTKSDIIFFQRSVPGHDNKMQFESSSYEGYFLASEKERDLFKLILKKEDELGDRSIMFTVQND

SEQ ID NO: 805 - protein, 156 aa, synthetic construct
  source 1..156: note = human_IL18_4CS_E6Q
YFGKLQSKLSVIRNLNDQVLFIDQGNRPLFEDMTDSDSRDNAPRTIFIISMYKDSQPRGMAVTISVKSEKISTLSSENKIISFKEMNPPDNIKDTKSDIIFFQRSVPGHDNKMQFESSSYEGYFLASEKERDLFKLILKKEDELGDRSIMFTVQND

SEQ ID NO: 806 - protein, 156 aa, synthetic construct
  source 1..156: note = human_IL18_4CS_D17N
YFGKLESKLSVIRNLNNQVLFIDQGNRPLFEDMTDSDSRDNAPRTIFIISMYKDSQPRGMAVTISVKSEKISTLSSENKIISFKEMNPPDNIKDTKSDIIFFQRSVPGHDNKMQFESSSYEGYFLASEKERDLFKLILKKEDELGDRSIMFTVQND

SEQ ID NO: 807 - protein, 156 aa, synthetic construct
  source 1..156: note = human_IL18_4CS_E31Q
YFGKLESKLSVIRNLNDQVLFIDQGNRPLFQDMTDSDSRDNAPRTIFIISMYKDSQPRGMAVTISVKSEKISTLSSENKIISFKEMNPPDNIKDTKSDIIFFQRSVPGHDNKMQFESSSYEGYFLASEKERDLFKLILKKEDELGDRSIMFTVQND

SEQ ID NO: 808 - protein, 156 aa, synthetic construct
  source 1..156: note = human_IL18_4CS_D35N
YFGKLESKLSVIRNLNDQVLFIDQGNRPLFEDMTNSDSRDNAPRTIFIISMYKDSQPRGMAVTISVKSEKISTLSSENKIISFKEMNPPDNIKDTKSDIIFFQRSVPGHDNKMQFESSSYEGYFLASEKERDLFKLILKKEDELGDRSIMFTVQND

SEQ ID NO: 809 - protein, 156 aa, synthetic construct
  source 1..156: note = human_IL18_4CS_D37N
YFGKLESKLSVIRNLNDQVLFIDQGNRPLFEDMTDSNSRDNAPRTIFIISMYKDSQPRGMAVTISVKSEKISTLSSENKIISFKEMNPPDNIKDTKSDIIFFQRSVPGHDNKMQFESSSYEGYFLASEKERDLFKLILKKEDELGDRSIMFTVQND

SEQ ID NO: 810 - protein, 156 aa, synthetic construct
  source 1..156: note = human_IL18_4CS_D40N
YFGKLESKLSVIRNLNDQVLFIDQGNRPLFEDMTDSDSRNNAPRTIFIISMYKDSQPRGMAVTISVKSEKISTLSSENKIISFKEMNPPDNIKDTKSDIIFFQRSVPGHDNKMQFESSSYEGYFLASEKERDLFKLILKKEDELGDRSIMFTVQND

SEQ ID NO: 811 - protein, 156 aa, synthetic construct
  source 1..156: note = human_IL18_4CS_N41Q
YFGKLESKLSVIRNLNDQVLFIDQGNRPLFEDMTDSDSRDQAPRTIFIISMYKDSQPRGMAVTISVKSEKISTLSSENKIISFKEMNPPDNIKDTKSDIIFFQRSVPGHDNKMQFESSSYEGYFLASEKERDLFKLILKKEDELGDRSIMFTVQND

SEQ ID NO: 812 - protein, 156 aa, synthetic construct
  source 1..156: note = human_IL18_4CS_K53R
YFGKLESKLSVIRNLNDQVLFIDQGNRPLFEDMTDSDSRDNAPRTIFIISMYRDSQPRGMAVTISVKSEKISTLSSENKIISFKEMNPPDNIKDTKSDIIFFQRSVPGHDNKMQFESSSYEGYFLASEKERDLFKLILKKEDELGDRSIMFTVQND

SEQ ID NO: 813 - protein, 156 aa, synthetic construct
  source 1..156: note = human_IL18_4CS_K53H
YFGKLESKLSVIRNLNDQVLFIDQGNRPLFEDMTDSDSRDNAPRTIFIISMYHDSQPRGMAVTISVKSEKISTLSSENKIISFKEMNPPDNIKDTKSDIIFFQRSVPGHDNKMQFESSSYEGYFLASEKERDLFKLILKKEDELGDRSIMFTVQND

SEQ ID NO: 814 - protein, 156 aa, synthetic construct
  source 1..156: note = human_IL18_4CS_K53M
YFGKLESKLSVIRNLNDQVLFIDQGNRPLFEDMTDSDSRDNAPRTIFIISMYMDSQPRGMAVTISVKSEKISTLSSENKIISFKEMNPPDNIKDTKSDIIFFQRSVPGHDNKMQFESSSYEGYFLASEKERDLFKLILKKEDELGDRSIMFTVQND

SEQ ID NO: 815 - protein, 156 aa, synthetic construct
  source 1..156: note = human_IL18_4CS_K53E
YFGKLESKLSVIRNLNDQVLFIDQGNRPLFEDMTDSDSRDNAPRTIFIISMYEDSQPRGMAVTISVKSEKISTLSSENKIISFKEMNPPDNIKDTKSDIIFFQRSVPGHDNKMQFESSSYEGYFLASEKERDLFKLILKKEDELGDRSIMFTVQND

SEQ ID NO: 816 - protein, 156 aa, synthetic construct
  source 1..156: note = human_IL18_4CS_K53Q
YFGKLESKLSVIRNLNDQVLFIDQGNRPLFEDMTDSDSRDNAPRTIFIISMYQDSQPRGMAVTISVKSEKISTLSSENKIISFKEMNPPDNIKDTKSDIIFFQRSVPGHDNKMQFESSSYEGYFLASEKERDLFKLILKKEDELGDRSIMFTVQND

SEQ ID NO: 817 - protein, 156 aa, synthetic construct
  source 1..156: note = human_IL18_4CS_K53A
YFGKLESKLSVIRNLNDQVLFIDQGNRPLFEDMTDSDSRDNAPRTIFIISMYADSQPRGMAVTISVKSEKISTLSSENKIISFKEMNPPDNIKDTKSDIIFFQRSVPGHDNKMQFESSSYEGYFLASEKERDLFKLILKKEDELGDRSIMFTVQND

SEQ ID NO: 818 - protein, 156 aa, synthetic construct
  source 1..156: note = human_IL18_4CS_Q103E
YFGKLESKLSVIRNLNDQVLFIDQGNRPLFEDMTDSDSRDNAPRTIFIISMYKDSQPRGMAVTISVKSEKISTLSSENKIISFKEMNPPDNIKDTKSDIIFFERSVPGHDNKMQFESSSYEGYFLASEKERDLFKLILKKEDELGDRSIMFTVQND

SEQ ID NO: 819 - protein, 156 aa, synthetic construct
  source 1..156: note = human_IL18_4CS_D110N
YFGKLESKLSVIRNLNDQVLFIDQGNRPLFEDMTDSDSRDNAPRTIFIISMYKDSQPRGMAVTISVKSEKISTLSSENKIISFKEMNPPDNIKDTKSDIIFFQRSVPGHNNKMQFESSSYEGYFLASEKERDLFKLILKKEDELGDRSIMFTVQND

SEQ ID NO: 820 - protein, 156 aa, synthetic construct
  source 1..156: note = human_IL18_4CS_N111Q
YFGKLESKLSVIRNLNDQVLFIDQGNRPLFEDMTDSDSRDNAPRTIFIISMYKDSQPRGMAVTISVKSEKISTLSSENKIISFKEMNPPDNIKDTKSDIIFFQRSVPGHDQKMQFESSSYEGYFLASEKERDLFKLILKKEDELGDRSIMFTVQND

SEQ ID NO: 821 - protein, 157 aa, synthetic construct
  source 1..157: note = human_IL18_4CS_K53S
YFGKLESKLSVIRNLNDQVLFIDQGNRPLFEDMTDSDSRDNAPRTIFIISMYSDSQPRGMAVTISVKSEKISTLSSENKIISFKEMNPPDNIKDTKSDIIFFQRSVPGHDNKMQFESSSYEGYFLASEKERDLFKLILKKEDELGDRSIMFTVQNED

SEQ ID NO: 822 - protein, 157 aa, synthetic construct
  source 1..157: note = human_IL18_4CS_K53G
YFGKLESKLSVIRNLNDQVLFIDQGNRPLFEDMTDSDSRDNAPRTIFIISMYGDSQPRGMAVTISVKSEKISTLSSENKIISFKEMNPPDNIKDTKSDIIFFQRSVPGHDNKMQFESSSYEGYFLASEKERDLFKLILKKEDELGDRSIMFTVQNED

SEQ ID NO: 823 - protein, 157 aa, synthetic construct
  source 1..157: note = human_IL18_4CS_K53T
YFGKLESKLSVIRNLNDQVLFIDQGNRPLFEDMTDSDSRDNAPRTIFIISMYTDSQPRGMAVTISVKSEKISTLSSENKIISFKEMNPPDNIKDTKSDIIFFQRSVPGHDNKMQFESSSYEGYFLASEKERDLFKLILKKEDELGDRSIMFTVQNED

SEQ ID NO: 824 - protein, 157 aa, synthetic construct
  source 1..157: note = human_IL18_4CS_K53I
YFGKLESKLSVIRNLNDQVLFIDQGNRPLFEDMTDSDSRDNAPRTIFIISMYIDSQPRGMAVTISVKSEKISTLSSENKIISFKEMNPPDNIKDTKSDIIFFQRSVPGHDNKMQFESSSYEGYFLASEKERDLFKLILKKEDELGDRSIMFTVQNED

SEQ ID NO: 825 - protein, 157 aa, synthetic construct
  source 1..157: note = human_IL18_4CS_K53L
YFGKLESKLSVIRNLNDQVLFIDQGNRPLFEDMTDSDSRDNAPRTIFIISMYLDSQPRGMAVTISVKSEKISTLSSENKIISFKEMNPPDNIKDTKSDIIFFQRSVPGHDNKMQFESSSYEGYFLASEKERDLFKLILKKEDELGDRSIMFTVQNED

SEQ ID NO: 826 - protein, 157 aa, synthetic construct
  source 1..157: note = human_IL18_4CS_K53N
YFGKLESKLSVIRNLNDQVLFIDQGNRPLFEDMTDSDSRDNAPRTIFIISMYNDSQPRGMAVTISVKSEKISTLSSENKIISFKEMNPPDNIKDTKSDIIFFQRSVPGHDNKMQFESSSYEGYFLASEKERDLFKLILKKEDELGDRSIMFTVQNED

SEQ ID NO: 827 - protein, 157 aa, synthetic construct
  source 1..157: note = human_IL18_4CS_K53D
YFGKLESKLSVIRNLNDQVLFIDQGNRPLFEDMTDSDSRDNAPRTIFIISMYDDSQPRGMAVTISVKSEKISTLSSENKIISFKEMNPPDNIKDTKSDIIFFQRSVPGHDNKMQFESSSYEGYFLASEKERDLFKLILKKEDELGDRSIMFTVQNED

SEQ ID NO: 828 - protein, 157 aa, synthetic construct
  source 1..157: note = human_IL18_4CS_M51K
YFGKLESKLSVIRNLNDQVLFIDQGNRPLFEDMTDSDSRDNAPRTIFIISKYKDSQPRGMAVTISVKSEKISTLSSENKIISFKEMNPPDNIKDTKSDIIFFQRSVPGHDNKMQFESSSYEGYFLASEKERDLFKLILKKEDELGDRSIMFTVQNED

SEQ ID NO: 829 - protein, 157 aa, synthetic construct
  source 1..157: note = human_IL18_4CS_M51Q
YFGKLESKLSVIRNLNDQVLFIDQGNRPLFEDMTDSDSRDNAPRTIFIISQYKDSQPRGMAVTISVKSEKISTLSSENKIISFKEMNPPDNIKDTKSDIIFFQRSVPGHDNKMQFESSSYEGYFLASEKERDLFKLILKKEDELGDRSIMFTVQNED

SEQ ID NO: 830 - protein, 157 aa, synthetic construct
  source 1..157: note = human_IL18_4CS_M51I
YFGKLESKLSVIRNLNDQVLFIDQGNRPLFEDMTDSDSRDNAPRTIFIISIYKDSQPRGMAVTISVKSEKISTLSSENKIISFKEMNPPDNIKDTKSDIIFFQRSVPGHDNKMQFESSSYEGYFLASEKERDLFKLILKKEDELGDRSIMFTVQNED

SEQ ID NO: 831 - protein, 157 aa, synthetic construct
  source 1..157: note = human_IL18_4CS_S55N
YFGKLESKLSVIRNLNDQVLFIDQGNRPLFEDMTDSDSRDNAPRTIFIISMYKDNQPRGMAVTISVKSEKISTLSSENKIISFKEMNPPDNIKDTKSDIIFFQRSVPGHDNKMQFESSSYEGYFLASEKERDLFKLILKKEDELGDRSIMFTVQNED

SEQ ID NO: 832 - protein, 157 aa, synthetic construct
  source 1..157: note = human_IL18_4CS_S55Q
YFGKLESKLSVIRNLNDQVLFIDQGNRPLFEDMTDSDSRDNAPRTIFIISMYKDQQPRGMAVTISVKSEKISTLSSENKIISFKEMNPPDNIKDTKSDIIFFQRSVPGHDNKMQFESSSYEGYFLASEKERDLFKLILKKEDELGDRSIMFTVQNED

SEQ ID NO: 833 - protein, 157 aa, synthetic construct
  source 1..157: note = human_IL18_4CS_Q56I
YFGKLESKLSVIRNLNDQVLFIDQGNRPLFEDMTDSDSRDNAPRTIFIISMYKDSIPRGMAVTISVKSEKISTLSSENKIISFKEMNPPDNIKDTKSDIIFFQRSVPGHDNKMQFESSSYEGYFLASEKERDLFKLILKKEDELGDRSIMFTVQNED

SEQ ID NO: 834 - protein, 157 aa, synthetic construct
  source 1..157: note = human_IL18_4CS_P57A
YFGKLESKLSVIRNLNDQVLFIDQGNRPLFEDMTDSDSRDNAPRTIFIISMYKDSQARGMAVTISVKSEKISTLSSENKIISFKEMNPPDNIKDTKSDIIFFQRSVPGHDNKMQFESSSYEGYFLASEKERDLFKLILKKEDELGDRSIMFTVQNED

SEQ ID NO: 835 - protein, 157 aa, synthetic construct
  source 1..157: note = human_IL18_4CS_P57E
YFGKLESKLSVIRNLNDQVLFIDQGNRPLFEDMTDSDSRDNAPRTIFIISMYKDSQERGMAVTISVKSEKISTLSSENKIISFKEMNPPDNIKDTKSDIIFFQRSVPGHDNKMQFESSSYEGYFLASEKERDLFKLILKKEDELGDRSIMFTVQNED

SEQ ID NO: 836 - protein, 157 aa, synthetic construct
  source 1..157: note = human_IL18_4CS_M60I
YFGKLESKLSVIRNLNDQVLFIDQGNRPLFEDMTDSDSRDNAPRTIFIISMYKDSQPRGIAVTISVKSEKISTLSSENKIISFKEMNPPDNIKDTKSDIIFFQRSVPGHDNKMQFESSSYEGYFLASEKERDLFKLILKKEDELGDRSIMFTVQNED

SEQ ID NO: 837 - protein, 157 aa, synthetic construct
  source 1..157: note = human_IL18_4CS_K8Y
YFGKLESYLSVIRNLNDQVLFIDQGNRPLFEDMTDSDSRDNAPRTIFIISMYKDSQPRGMAVTISVKSEKISTLSSENKIISFKEMNPPDNIKDTKSDIIFFQRSVPGHDNKMQFESSSYEGYFLASEKERDLFKLILKKEDELGDRSIMFTVQNED

SEQ ID NO: 838 - protein, 157 aa, synthetic construct
  source 1..157: note = human_IL18_4CS_K8Q
YFGKLESQLSVIRNLNDQVLFIDQGNRPLFEDMTDSDSRDNAPRTIFIISMYKDSQPRGMAVTISVKSEKISTLSSENKIISFKEMNPPDNIKDTKSDIIFFQRSVPGHDNKMQFESSSYEGYFLASEKERDLFKLILKKEDELGDRSIMFTVQNED

SEQ ID NO: 839 - protein, 157 aa, synthetic construct
  source 1..157: note = human_IL18_4CS_K8E
YFGKLESELSVIRNLNDQVLFIDQGNRPLFEDMTDSDSRDNAPRTIFIISMYKDSQPRGMAVTISVKSEKISTLSSENKIISFKEMNPPDNIKDTKSDIIFFQRSVPGHDNKMQFESSSYEGYFLASEKERDLFKLILKKEDELGDRSIMFTVQNED

SEQ ID NO: 840 - protein, 157 aa, synthetic construct
  source 1..157: note = human_IL18_4CS_H109W
YFGKLESKLSVIRNLNDQVLFIDQGNRPLFEDMTDSDSRDNAPRTIFIISMYKDSQPRGMAVTISVKSEKISTLSSENKIISFKEMNPPDNIKDTKSDIIFFQRSVPGWDNKMQFESSSYEGYFLASEKERDLFKLILKKEDELGDRSIMFTVQNED

SEQ ID NO: 841 - protein, 157 aa, synthetic construct
  source 1..157: note = human_IL18_4CS_H109Y
YFGKLESKLSVIRNLNDQVLFIDQGNRPLFEDMTDSDSRDNAPRTIFIISMYKDSQPRGMAVTISVKSEKISTLSSENKIISFKEMNPPDNIKDTKSDIIFFQRSVPGYDNKMQFESSSYEGYFLASEKERDLFKLILKKEDELGDRSIMFTVQNED

SEQ ID NO: 842 - protein, 157 aa, synthetic construct
  source 1..157: note = human_IL18_4CS_E31Q_K53A
YFGKLESKLSVIRNLNDQVLFIDQGNRPLFQDMTDSDSRDNAPRTIFIISMYADSQPRGMAVTISVKSEKISTLSSENKIISFKEMNPPDNIKDTKSDIIFFQRSVPGHDNKMQFESSSYEGYFLASEKERDLFKLILKKEDELGDRSIMFTVQNED

SEQ ID NO: 843 - protein, 157 aa, synthetic construct
  source 1..157: note = human_IL18_4CS_E31Q_D35N_K53A
YFGKLESKLSVIRNLNDQVLFIDQGNRPLFQDMTNSDSRDNAPRTIFIISMYADSQPRGMAVTISVKSEKISTLSSENKIISFKEMNPPDNIKDTKSDIIFFQRSVPGHDNKMQFESSSYEGYFLASEKERDLFKLILKKEDELGDRSIMFTVQNED

SEQ ID NO: 844 - protein, 157 aa, synthetic construct
  source 1..157: note = human_IL18_4CS_E31Q_N41Q_K53A
YFGKLESKLSVIRNLNDQVLFIDQGNRPLFQDMTDSDSRDQAPRTIFIISMYADSQPRGMAVTISVKSEKISTLSSENKIISFKEMNPPDNIKDTKSDIIFFQRSVPGHDNKMQFESSSYEGYFLASEKERDLFKLILKKEDELGDRSIMFTVQNED

SEQ ID NO: 845 - protein, 157 aa, synthetic construct
  source 1..157: note = human_IL18_4CS_E31Q_D35N_N41Q_K53A
YFGKLESKLSVIRNLNDQVLFIDQGNRPLFQDMTNSDSRDQAPRTIFIISMYADSQPRGMAVTISVKSEKISTLSSENKIISFKEMNPPDNIKDTKSDIIFFQRSVPGHDNKMQFESSSYEGYFLASEKERDLFKLILKKEDELGDRSIMFTVQNED

SEQ ID NO: 846 - protein, 157 aa, synthetic construct
  source 1..157: note = human_IL18_4CS_E31Q_D35N
YFGKLESKLSVIRNLNDQVLFIDQGNRPLFQDMTNSDSRDNAPRTIFIISMYKDSQPRGMAVTISVKSEKISTLSSENKIISFKEMNPPDNIKDTKSDIIFFQRSVPGHDNKMQFESSSYEGYFLASEKERDLFKLILKKEDELGDRSIMFTVQNED

SEQ ID NO: 847 - protein, 157 aa, synthetic construct
  source 1..157: note = human_IL18_4CS_E31Q_N41Q
YFGKLESKLSVIRNLNDQVLFIDQGNRPLFQDMTDSDSRDQAPRTIFIISMYKDSQPRGMAVTISVKSEKISTLSSENKIISFKEMNPPDNIKDTKSDIIFFQRSVPGHDNKMQFESSSYEGYFLASEKERDLFKLILKKEDELGDRSIMFTVQNED

SEQ ID NO: 848 - protein, 157 aa, synthetic construct
  source 1..157: note = human_IL18_4CS_E31Q_D35N_N41Q
YFGKLESKLSVIRNLNDQVLFIDQGNRPLFQDMTNSDSRDQAPRTIFIISMYKDSQPRGMAVTISVKSEKISTLSSENKIISFKEMNPPDNIKDTKSDIIFFQRSVPGHDNKMQFESSSYEGYFLASEKERDLFKLILKKEDELGDRSIMFTVQNED

SEQ ID NO: 849 - protein, 157 aa, synthetic construct
  source 1..157: note = human_IL18_4CS_E31Q_D37N
YFGKLESKLSVIRNLNDQVLFIDQGNRPLFQDMTDSNSRDNAPRTIFIISMYKDSQPRGMAVTISVKSEKISTLSSENKIISFKEMNPPDNIKDTKSDIIFFQRSVPGHDNKMQFESSSYEGYFLASEKERDLFKLILKKEDELGDRSIMFTVQNED

SEQ ID NO: 850 - protein, 157 aa, synthetic construct
  source 1..157: note = human_IL18_4CS_E31Q_D37N_K53A
YFGKLESKLSVIRNLNDQVLFIDQGNRPLFQDMTDSNSRDNAPRTIFIISMYADSQPRGMAVTISVKSEKISTLSSENKIISFKEMNPPDNIKDTKSDIIFFQRSVPGHDNKMQFESSSYEGYFLASEKERDLFKLILKKEDELGDRSIMFTVQNED

SEQ ID NO: 851 - protein, 387 aa, synthetic construct
  source 1..387: note = IL18_E6A_K53A
YFGKLASKLSVIRNLNDQVLFIDQGNRPLFEDMTDSDCRDNAPRTIFIISMYADSQPRGMAVTISVKCEAISTLSCENKIISFKEMNPPDNIKDTKSDIIFFQRSVPGHDNKMQFESSSYEGYFLACEKERDLFKLILKKEDELGDRSIMFTVQNEDEPKSSDKTHTCPPCPAPPVAGPSVFLFPPKPKDTLMISRTPEVTCVVVDVKHEDPEVKFNWYVDGVEVHNAKTKPREEEYNSTYRVVSVLTVLHQDWLNGKEYKCKVSNKALPAPIEKTISKAKGQPREPQVYTLPPSREEMTKNQVSLTCDVSGFYPSDIAVEWESDGQPENNYKTTPPVLDSDGSFFLYSKLTVDKSRWEQGDVFSCSVMHEALHNHYTQKSLSLSPG

SEQ ID NO: 852 - protein, 387 aa, synthetic construct
  source 1..387: note = IL18_H6-12
YFGKLESKLSVIRNLNDQVLFIDQGNRPLFEDMTDSDCRDNAPRTIFIISKYSDSLARGLAVTISVKCEKISTLSCENKIISFKEMNPPDNIKDTKSDIIFFQRDVPGHSRKMQFESSSYEGYFLACEKERDLFKLILKKEDELGDRSIMFTVQNEDEPKSSDKTHTCPPCPAPPVAGPSVFLFPPKPKDTLMISRTPEVTCVVVDVKHEDPEVKFNWYVDGVEVHNAKTKPREEEYNSTYRVVSVLTVLHQDWLNGKEYKCKVSNKALPAPIEKTISKAKGQPREPQVYTLPPSREEMTKNQVSLTCDVSGFYPSDIAVEWESDGQPENNYKTTPPVLDSDGSFFLYSKLTVDKSRWEQGDVFSCSVMHEALHNHYTQKSLSLSPG

SEQ ID NO: 853 - protein, 387 aa, synthetic construct; identical to SEQ ID NO: 851
  source 1..387: note = IL18_H6-31

SEQ ID NO: 854 - protein, 387 aa, synthetic construct; identical to SEQ ID NO: 277
  source 1..387: note = IL18_4CS_E6A_K53A

SEQ ID NO: 855 - protein, 387 aa, synthetic construct; identical to SEQ ID NO: 279
  source 1..387: note = IL18_4CS_H6-12

SEQ ID NO: 856 - protein, 387 aa, synthetic construct; identical to SEQ ID NO: 277
  source 1..387: note = IL18_4CS_H6-31

SEQ ID NO: 857 - protein, 157 aa, synthetic construct
  source 1..157: note = human_IL18_4CS_S38K
YFGKLESKLSVIRNLNDQVLFIDQGNRPLFEDMTDSDKRDNAPRTIFIISMYKDSQPRGMAVTISVKSEKISTLSSENKIISFKEMNPPDNIKDTKSDIIFFQRSVPGHDNKMQFESSSYEGYFLASEKERDLFKLILKKEDELGDRSIMFTVQNED

SEQ ID NO: 858 - protein, 157 aa, synthetic construct
  source 1..157: note = human_IL18_4CS_S38D
YFGKLESKLSVIRNLNDQVLFIDQGNRPLFEDMTDSDDRDNAPRTIFIISMYKDSQPRGMAVTISVKSEKISTLSSENKIISFKEMNPPDNIKDTKSDIIFFQRSVPGHDNKMQFESSSYEGYFLASEKERDLFKLILKKEDELGDRSIMFTVQNED

SEQ ID NO: 859 - protein, 157 aa, synthetic construct
  source 1..157: note = human_IL18_4CS_S68K
YFGKLESKLSVIRNLNDQVLFIDQGNRPLFEDMTDSDSRDNAPRTIFIISMYKDSQPRGMAVTISVKKEKISTLSSENKIISFKEMNPPDNIKDTKSDIIFFQRSVPGHDNKMQFESSSYEGYFLASEKERDLFKLILKKEDELGDRSIMFTVQNED

SEQ ID NO: 860 - protein, 157 aa, synthetic construct
  source 1..157: note = human_IL18_4CS_S76E
YFGKLESKLSVIRNLNDQVLFIDQGNRPLFEDMTDSDSRDNAPRTIFIISMYKDSQPRGMAVTISVKSEKISTLSEENKIISFKEMNPPDNIKDTKSDIIFFQRSVPGHDNKMQFESSSYEGYFLASEKERDLFKLILKKEDELGDRSIMFTVQNED

SEQ ID NO: 861 - protein, 157 aa, synthetic construct
  source 1..157: note = human_IL18_4CS_S76K
YFGKLESKLSVIRNLNDQVLFIDQGNRPLFEDMTDSDSRDNAPRTIFIISMYKDSQPRGMAVTISVKSEKISTLSKENKIISFKEMNPPDNIKDTKSDIIFFQRSVPGHDNKMQFESSSYEGYFLASEKERDLFKLILKKEDELGDRSIMFTVQNED

SEQ ID NO: 862 - protein, 157 aa, synthetic construct
  source 1..157: note = human_IL18_4CS_S127K
YFGKLESKLSVIRNLNDQVLFIDQGNRPLFEDMTDSDSRDNAPRTIFIISMYKDSQPRGMAVTISVKSEKISTLSSENKIISFKEMNPPDNIKDTKSDIIFFQRSVPGHDNKMQFESSSYEGYFLAKEKERDLFKLILKKEDELGDRSIMFTVQNED

SEQ ID NO: 863 - protein, 157 aa, synthetic construct
  source 1..157: note = human_IL18_4CS_N14C_E31Q_S127C
YFGKLESKLSVIRCLNDQVLFIDQGNRPLFQDMTDSDSRDNAPRTIFIISMYKDSQPRGMAVTISVKSEKISTLSSENKIISFKEMNPPDNIKDTKSDIIFFQRSVPGHDNKMQFESSSYEGYFLACEKERDLFKLILKKEDELGDRSIMFTVQNED

SEQ ID NO: 864 - protein, 157 aa, synthetic construct
  source 1..157: note = human_IL18_3CS_E31Q_M33C_S38C
YFGKLESKLSVIRNLNDQVLFIDQGNRPLFQDCTDSDCRDNAPRTIFIISMYKDSQPRGMAVTISVKSEKISTLSSENKIISFKEMNPPDNIKDTKSDIIFFQRSVPGHDNKMQFESSSYEGYFLASEKERDLFKLILKKEDELGDRSIMFTVQNED

SEQ ID NO: 865 - protein, 157 aa, synthetic construct
  source 1..157: note = human_IL18_3CS_E31Q_S76C_L138C
YFGKLESKLSVIRNLNDQVLFIDQGNRPLFQDMTDSDSRDNAPRTIFIISMYKDSQPRGMAVTISVKSEKISTLSCENKIISFKEMNPPDNIKDTKSDIIFFQRSVPGHDNKMQFESSSYEGYFLASEKERDLFKLICKKEDELGDRSIMFTVQNED

SEQ ID NO: 866 - protein, 157 aa, synthetic construct; identical to SEQ ID NO: 863
  source 1..157: note = human_IL18_3CS_N14C_E31Q_S127C

SEQ ID NO: 867 - protein, 157 aa, synthetic construct
  source 1..157: note = human_IL18_3CS_E31Q_S68I
YFGKLESKLSVIRNLNDQVLFIDQGNRPLFQDMTDSDSRDNAPRTIFIISMYKDSQPRGMAVTISVKIEKISTLSSENKIISFKEMNPPDNIKDTKSDIIFFQRSVPGHDNKMQFESSSYEGYFLASEKERDLFKLILKKEDELGDRSIMFTVQNED

SEQ ID NO: 868 - protein, 157 aa, synthetic construct
  source 1..157: note = human_IL18_3CS_E31Q_S68F
YFGKLESKLSVIRNLNDQVLFIDQGNRPLFQDMTDSDSRDNAPRTIFIISMYKDSQPRGMAVTISVKFEKISTLSSENKIISFKEMNPPDNIKDTKSDIIFFQRSVPGHDNKMQFESSSYEGYFLASEKERDLFKLILKKEDELGDRSIMFTVQNED

SEQ ID NO: 869 - protein, 157 aa, synthetic construct
  source 1..157: note = human_IL18_3CS_E31Q_S127W
YFGKLESKLSVIRNLNDQVLFIDQGNRPLFQDMTDSDSRDNAPRTIFIISMYKDSQPRGMAVTISVKSEKISTLSSENKIISFKEMNPPDNIKDTKSDIIFFQRSVPGHDNKMQFESSSYEGYFLAWEKERDLFKLILKKEDELGDRSIMFTVQNED

SEQ ID NO: 870 - protein, 157 aa, synthetic construct
  source 1..157: note = human_IL18_3CS_E31Q_S127Y
YFGKLESKLSVIRNLNDQVLFIDQGNRPLFQDMTDSDSRDNAPRTIFIISMYKDSQPRGMAVTISVKSEKISTLSSENKIISFKEMNPPDNIKDTKSDIIFFQRSVPGHDNKMQFESSSYEGYFLAYEKERDLFKLILKKEDELGDRSIMFTVQNED

SEQ ID NO: 871 - protein, 157 aa, synthetic construct
  source 1..157: note = human_IL18_3CS_E31Q_S127F
YFGKLESKLSVIRNLNDQVLFIDQGNRPLFQDMTDSDSRDNAPRTIFIISMYKDSQPRGMAVTISVKSEKISTLSSENKIISFKEMNPPDNIKDTKSDIIFFQRSVPGHDNKMQFESSSYEGYFLAFEKERDLFKLILKKEDELGDRSIMFTVQNED

SEQ ID NO: 872 - protein, 157 aa, synthetic construct
  source 1..157: note = human_IL18_4CS_S10C_E31Q_I49C
YFGKLESKLCVIRNLNDQVLFIDQGNRPLFQDMTDSDSRDNAPRTIFICSMYKDSQPRGMAVTISVKSEKISTLSSENKIISFKEMNPPDNIKDTKSDIIFFQRSVPGHDNKMQFESSSYEGYFLASEKERDLFKLILKKEDELGDRSIMFTVQNED

SEQ ID NO: 873 - protein, 157 aa, synthetic construct
  source 1..157: note = human_IL18_4CS_L15C_E31Q_R147C
YFGKLESKLSVIRNCNDQVLFIDQGNRPLFQDMTDSDSRDNAPRTIFIISMYKDSQPRGMAVTISVKSEKISTLSSENKIISFKEMNPPDNIKDTKSDIIFFQRSVPGHDNKMQFESSSYEGYFLASEKERDLFKLILKKEDELGDCSIMFTVQNED

SEQ ID NO: 874 - protein, 157 aa, synthetic construct
  source 1..157: note = human_IL18_4CS_P28C_E31Q_L136C
YFGKLESKLSVIRNLNDQVLFIDQGNRCLFQDMTDSDSRDNAPRTIFIISMYKDSQPRGMAVTISVKSEKISTLSSENKIISFKEMNPPDNIKDTKSDIIFFQRSVPGHDNKMQFESSSYEGYFLASEKERDLFKCILKKEDELGDRSIMFTVQNED

SEQ ID NO: 875 - protein, 157 aa, synthetic construct
  source 1..157: note = human_IL18_4CS_E31Q_S50C_P88C
YFGKLESKLSVIRNLNDQVLFIDQGNRPLFQDMTDSDSRDNAPRTIFIICMYKDSQPRGMAVTISVKSEKISTLSSENKIISFKEMNCPDNIKDTKSDIIFFQRSVPGHDNKMQFESSSYEGYFLASEKERDLFKLILKKEDELGDRSIMFTVQNED

SEQ ID NO: 876 - protein, 157 aa, synthetic construct
  source 1..157: note = human_IL18_4CS_E31Q_T63C_P88C
YFGKLESKLSVIRNLNDQVLFIDQGNRPLFQDMTDSDSRDNAPRTIFIISMYKDSQPRGMAVCISVKSEKISTLSSENKIISFKEMNCPDNIKDTKSDIIFFQRSVPGHDNKMQFESSSYEGYFLASEKERDLFKLILKKEDELGDRSIMFTVQNED

SEQ ID NO: 877 - protein, 157 aa, synthetic construct
  source 1..157: note = human_IL18_4CS_E31Q_V62C_Q103C
YFGKLESKLSVIRNLNDQVLFIDQGNRPLFQDMTDSDSRDNAPRTIFIISMYKDSQPRGMACTISVKSEKISTLSSENKIISFKEMNPPDNIKDTKSDIIFFCRSVPGHDNKMQFESSSYEGYFLASEKERDLFKLILKKEDELGDRSIMFTVQNED

SEQ ID NO: 878 - protein, 157 aa, synthetic construct
  source 1..157: note = human_IL18_4CS_S10C_E31Q_N155C
YFGKLESKLCVIRNLNDQVLFIDQGNRPLFQDMTDSDSRDNAPRTIFIISMYKDSQPRGMAVTISVKSEKISTLSSENKIISFKEMNPPDNIKDTKSDIIFFQRSVPGHDNKMQFESSSYEGYFLASEKERDLFKLILKKEDELGDRSIMFTVQCED

SEQ ID NO: 879 - protein, 157 aa, synthetic construct
  source 1..157: note = human_IL18_4CS_E31Q_S65C_P88C
YFGKLESKLSVIRNLNDQVLFIDQGNRPLFQDMTDSDSRDNAPRTIFIISMYKDSQPRGMAVTICVKSEKISTLSSENKIISFKEMNCPDNIKDTKSDIIFFQRSVPGHDNKMQFESSSYEGYFLASEKERDLFKLILKKEDELGDRSIMFTVQNED

SEQ ID NO: 880 - protein, 157 aa, synthetic construct
  source 1..157: note = human_IL18_4CS_S7C_E31Q_S50C
YFGKLECKLSVIRNLNDQVLFIDQGNRPLFQDMTDSDSRDNAPRTIFIICMYKDSQPRGMAVTISVKSEKISTLSSENKIISFKEMNPPDNIKDTKSDIIFFQRSVPGHDNKMQFESSSYEGYFLASEKERDLFKLILKKEDELGDRSIMFTVQNED

SEQ ID NO: 881 - protein, 157 aa, synthetic construct
  source 1..157: note = human_IL18_4CS_E31Q_D54C_A61C
YFGKLESKLSVIRNLNDQVLFIDQGNRPLFQDMTDSDSRDNAPRTIFIISMYKCSQPRGMCVTISVKSEKISTLSSENKIISFKEMNPPDNIKDTKSDIIFFQRSVPGHDNKMQFESSSYEGYFLASEKERDLFKLILKKEDELGDRSIMFTVQNED

SEQ ID NO: 882 - protein, 157 aa, synthetic construct
  source 1..157: note = human_IL18_4CS_E31Q_A126C_K139C
YFGKLESKLSVIRNLNDQVLFIDQGNRPLFQDMTDSDSRDNAPRTIFIISMYKDSQPRGMAVTISVKSEKISTLSSENKIISFKEMNPPDNIKDTKSDIIFFQRSVPGHDNKMQFESSSYEGYFLCSEKERDLFKLILCKEDELGDRSIMFTVQNED

SEQ ID NO: 883 - protein, 157 aa, synthetic construct
  source 1..157: note = human_IL18_4CS_N14W_E31Q
YFGKLESKLSVIRWLNDQVLFIDQGNRPLFQDMTDSDSRDNAPRTIFIISMYKDSQPRGMAVTISVKSEKISTLSSENKIISFKEMNPPDNIKDTKSDIIFFQRSVPGHDNKMQFESSSYEGYFLASEKERDLFKLILKKEDELGDRSIMFTVQNED

SEQ ID NO: 884 - protein, 157 aa, synthetic construct
  source 1..157: note = human_IL18_4CS_E31Q_D146Y
YFGKLESKLSVIRNLNDQVLFIDQGNRPLFQDMTDSDSRDNAPRTIFIISMYKDSQPRGMAVTISVKSEKISTLSSENKIISFKEMNPPDNIKDTKSDIIFFQRSVPGHDNKMQFESSSYEGYFLASEKERDLFKLILKKEDELGYRSIMFTVQNED

SEQ ID NO: 885 - protein, 157 aa, synthetic construct
  source 1..157: note = human_IL18_4CS_E31Q_D146L
YFGKLESKLSVIRNLNDQVLFIDQGNRPLFQDMTDSDSRDNAPRTIFIISMYKDSQPRGMAVTISVKSEKISTLSSENKIISFKEMNPPDNIKDTKSDIIFFQRSVPGHDNKMQFESSSYEGYFLASEKERDLFKLILKKEDELGLRSIMFTVQNED

SEQ ID NO: 886 - protein, 157 aa, synthetic construct
  source 1..157: note = human_IL18_4CS_E31Q_D146F
YFGKLESKLSVIRNLNDQVLFIDQGNRPLFQDMTDSDSRDNAPRTIFIISMYKDSQPRGMAVTISVKSEKISTLSSENKIISFKEMNPPDNIKDTKSDIIFFQRSVPGHDNKMQFESSSYEGYFLASEKERDLFKLILKKEDELGFRSIMFTVQNED

SEQ ID NO: 887 - protein, 157 aa, synthetic construct
  source 1..157: note = human_IL18_4CS_E31Q_Q103L
YFGKLESKLSVIRNLNDQVLFIDQGNRPLFQDMTDSDSRDNAPRTIFIISMYKDSQPRGMAVTISVKSEKISTLSSENKIISFKEMNPPDNIKDTKSDIIFFLRSVPGHDNKMQFESSSYEGYFLASEKERDLFKLILKKEDELGDRSIMFTVQNED

SEQ ID NO: 888 - protein, 157 aa, synthetic construct
  source 1..157: note = human_IL18_4CS_E31Q_Q103I
YFGKLESKLSVIRNLNDQVLFIDQGNRPLFQDMTDSDSRDNAPRTIFIISMYKDSQPRGMAVTISVKSEKISTLSSENKIISFKEMNPPDNIKDTKSDIIFFIRSVPGHDNKMQFESSSYEGYFLASEKERDLFKLILKKEDELGDRSIMFTVQNED

SEQ ID NO: 889 - protein, 157 aa, synthetic construct
  source 1..157: note = human_IL18_4CS_E31Q_M150F
YFGKLESKLSVIRNLNDQVLFIDQGNRPLFQDMTDSDSRDNAPRTIFIISMYKDSQPRGMAVTISVKSEKISTLSSENKIISFKEMNPPDNIKDTKSDIIFFQRSVPGHDNKMQFESSSYEGYFLASEKERDLFKLILKKEDELGDRSIFFTVQNED

SEQ ID NO: 890 - protein, 157 aa, synthetic construct
  source 1..157: note = human_IL18_4CS_Q18L_E31Q
YFGKLESKLSVIRNLNDLVLFIDQGNRPLFQDMTDSDSRDNAPRTIFIISMYKDSQPRGMAVTISVKSEKISTLSSENKIISFKEMNPPDNIKDTKSDIIFFQRSVPGHDNKMQFESSSYEGYFLASEKERDLFKLILKKEDELGDRSIMFTVQNED

SEQ ID NO: 891 - protein, 157 aa, synthetic construct
  source 1..157: note = human_IL18_3CS_E31Q_S68Y
YFGKLESKLSVIRNLNDQVLFIDQGNRPLFQDMTDSDSRDNAPRTIFIISMYKDSQPRGMAVTISVKYEKISTLSSENKIISFKEMNPPDNIKDTKSDIIFFQRSVPGHDNKMQFESSSYEGYFLASEKERDLFKLILKKEDELGDRSIMFTVQNED

SEQ ID NO: 892 - protein, 157 aa, synthetic construct
  source 1..157: note = human_IL18_3CS_E31Q_S38Q
YFGKLESKLSVIRNLNDQVLFIDQGNRPLFQDMTDSDQRDNAPRTIFIISMYKDSQPRGMAVTISVKSEKISTLSSENKIISFKEMNPPDNIKDTKSDIIFFQRSVPGHDNKMQFESSSYEGYFLASEKERDLFKLILKKEDELGDRSIMFTVQNED

SEQ ID NO: 893 - protein, 157 aa, synthetic construct
  source 1..157: note = human_IL18_3CS_E31Q_S38R
YFGKLESKLSVIRNLNDQVLFIDQGNRPLFQDMTDSDRRDNAPRTIFIISMYKDSQPRGMAVTISVKSEKISTLSSENKIISFKEMNPPDNIKDTKSDIIFFQRSVPGHDNKMQFESSSYEGYFLASEKERDLFKLILKKEDELGDRSIMFTVQNED

SEQ ID NO: 894 - protein, 157 aa, synthetic construct
  source 1..157: note = human_IL18_3CS_E31Q_S68D
YFGKLESKLSVIRNLNDQVLFIDQGNRPLFQDMTDSDSRDNAPRTIFIISMYKDSQPRGMAVTISVKDEKISTLSSENKIISFKEMNPPDNIKDTKSDIIFFQRSVPGHDNKMQFESSSYEGYFLASEKERDLFKLILKKEDELGDRSIMFTVQNED

SEQ ID NO: 895 - protein, 157 aa, synthetic construct
  source 1..157: note = human_IL18_4CS_S7P_E31Q
YFGKLEPKLSVIRNLNDQVLFIDQGNRPLFQDMTDSDSRDNAPRTIFIISMYKDSQPRGMAVTISVKSEKISTLSSENKIISFKEMNPPDNIKDTKSDIIFFQRSVPGHDNKMQFESSSYEGYFLASEKERDLFKLILKKEDELGDRSIMFTVQNED

SEQ ID NO: 896 - protein, 157 aa, synthetic construct
  source 1..157: note = human_IL18_4CS_V11I_E31Q
YFGKLESKLSIIRNLNDQVLFIDQGNRPLFQDMTDSDSRDNAPRTIFIISMYKDSQPRGMAVTISVKSEKISTLSSENKIISFKEMNPPDNIKDTKSDIIFFQRSVPGHDNKMQFESSSYEGYFLASEKERDLFKLILKKEDELGDRSIMFTVQNED

SEQ ID NO: 897 - protein, 157 aa, synthetic construct
  source 1..157: note = human_IL18_4CS_D23N_E31Q
YFGKLESKLSVIRNLNDQVLFINQGNRPLFQDMTDSDSRDNAPRTIFIISMYKDSQPRGMAVTISVKSEKISTLSSENKIISFKEMNPPDNIKDTKSDIIFFQRSVPGHDNKMQFESSSYEGYFLASEKERDLFKLILKKEDELGDRSIMFTVQNED

SEQ ID NO: 898 - protein, 157 aa, synthetic construct
  source 1..157: note = human_IL18_4CS_D23S_E31Q
YFGKLESKLSVIRNLNDQVLFISQGNRPLFQDMTDSDSRDNAPRTIFIISMYKDSQPRGMAVTISVKSEKISTLSSENKIISFKEMNPPDNIKDTKSDIIFFQRSVPGHDNKMQFESSSYEGYFLASEKERDLFKLILKKEDELGDRSIMFTVQNED

SEQ ID NO: 899 - protein, 157 aa, synthetic construct
  source 1..157: note = human_IL18_4CS_R27Q_E31Q
YFGKLESKLSVIRNLNDQVLFIDQGNQPLFQDMTDSDSRDNAPRTIFIISMYKDSQPRGMAVTISVKSEKISTLSSENKIISFKEMNPPDNIKDTKSDIIFFQRSVPGHDNKMQFESSSYEGYFLASEKERDLFKLILKKEDELGDRSIMFTVQNED

SEQ ID NO: 900 - protein, 157 aa, synthetic construct
  source 1..157: note = human_IL18_4CS_L29V_E31Q
YFGKLESKLSVIRNLNDQVLFIDQGNRPVFQDMTDSDSRDNAPRTIFIISMYKDSQPRGMAVTISVKSEKISTLSSENKIISFKEMNPPDNIKDTKSDIIFFQRSVPGHDNKMQFESSSYEGYFLASEKERDLFKLILKKEDELGDRSIMFTVQNED

SEQ ID NO: 901 - protein, 157 aa, synthetic construct
  source 1..157: note = human_IL18_4CS_E31Q_T34P
YFGKLESKLSVIRNLNDQVLFIDQGNRPLFQDMPDSDSRDNAPRTIFIISMYKDSQPRGMAVTISVKSEKISTLSSENKIISFKEMNPPDNIKDTKSDIIFFQRSVPGHDNKMQFESSSYEGYFLASEKERDLFKLILKKEDELGDRSIMFTVQNED

SEQ ID NO: 902 - protein, 157 aa, synthetic construct
  source 1..157: note = human_IL18_4CS_E31Q_R39T
YFGKLESKLSVIRNLNDQVLFIDQGNRPLFQDMTDSDSTDNAPRTIFIISMYKDSQPRGMAVTISVKSEKISTLSSENKIISFKEMNPPDNIKDTKSDIIFFQRSVPGHDNKMQFESSSYEGYFLASEKERDLFKLILKKEDELGDRSIMFTVQNED

SEQ ID NO: 903 - protein, 157 aa, synthetic construct
  source 1..157: note = human_IL18_4CS_E31Q_R39S
YFGKLESKLSVIRNLNDQVLFIDQGNRPLFQDMTDSDSSDNAPRTIFIISMYKDSQPRGMAVTISVKSEKISTLSSENKIISFKEMNPPDNIKDTKSDIIFFQRSVPGHDNKMQFESSSYEGYFLASEKERDLFKLILKKEDELGDRSIMFTVQNED

SEQ ID NO: 904 - protein, 157 aa, synthetic construct
  source 1..157: note = human_IL18_4CS_E31Q_R44Q
YFGKLESKLSVIRNLNDQVLFIDQGNRPLFQDMTDSDSRDNAPQTIFIISMYKDSQPRGMAVTISVKSEKISTLSSENKIISFKEMNPPDNIKDTKSDIIFFQRSVPGHDNKMQFESSSYEGYFLASEKERDLFKLILKKEDELGDRSIMFTVQNED

SEQ ID NO: 905 - protein, 157 aa, synthetic construct
  source 1..157: note = human_IL18_4CS_E31Q_I46V
YFGKLESKLSVIRNLNDQVLFIDQGNRPLFQDMTDSDSRDNAPRTVFIISMYKDSQPRGMAVTISVKSEKISTLSSENKIISFKEMNPPDNIKDTKSDIIFFQRSVPGHDNKMQFESSSYEGYFLASEKERDLFKLILKKEDELGDRSIMFTVQNED

SEQ ID NO: 906 - protein, 157 aa, synthetic construct
  source 1..157: note = human_IL18_4CS_E31Q_S50Y
YFGKLESKLSVIRNLNDQVLFIDQGNRPLFQDMTDSDSRDNAPRTIFIIYMYKDSQPRGMAVTISVKSEKISTLSSENKIISFKEMNPPDNIKDTKSDIIFFQRSVPGHDNKMQFESSSYEGYFLASEKERDLFKLILKKEDELGDRSIMFTVQNED

SEQ ID NO: 907 - protein, 157 aa, synthetic construct
  source 1..157: note = human_IL18_4CS_E31Q_Q56L
YFGKLESKLSVIRNLNDQVLFIDQGNRPLFQDMTDSDSRDNAPRTIFIISMYKDSLPRGMAVTISVKSEKISTLSSENKIISFKEMNPPDNIKDTKSDIIFFQRSVPGHDNKMQFESSSYEGYFLASEKERDLFKLILKKEDELGDRSIMFTVQNED

SEQ ID NO: 908 - protein, 157 aa, synthetic construct
  source 1..157: note = human_IL18_4CS_E31Q_Q56L_P57T
YFGKLESKLSVIRNLNDQVLFIDQGNRPLFQDMTDSDSRDNAPRTIFIISMYKDSLTRGMAVTISVKSEKISTLSSENKIISFKEMNPPDNIKDTKSDIIFFQRSVPGHDNKMQFESSSYEGYFLASEKERDLFKLILKKEDELGDRSIMFTVQNED

SEQ ID NO: 909 - protein, 157 aa, synthetic construct
  source 1..157: note = human_IL18_4CS_E31Q_P57T
YFGKLESKLSVIRNLNDQVLFIDQGNRPLFQDMTDSDSRDNAPRTIFIISMYKDSQTRGMAVTISVKSEKISTLSSENKIISFKEMNPPDNIKDTKSDIIFFQRSVPGHDNKMQFESSSYEGYFLASEKERDLFKLILKKEDELGDRSIMFTVQNED

SEQ ID NO: 910 - protein, 157 aa, synthetic construct
  source 1..157: note = human_IL18_4CS_E31Q_P57V
YFGKLESKLSVIRNLNDQVLFIDQGNRPLFQDMTDSDSRDNAPRTIFIISMYKDSQVRGMAVTISVKSEKISTLSSENKIISFKEMNPPDNIKDTKSDIIFFQRSVPGHDNKMQFESSSYEGYFLASEKERDLFKLILKKEDELGDRSIMFTVQNED

SEQ ID NO: 911 - protein, 157 aa, synthetic construct
  source 1..157: note = human_IL18_4CS_E31Q_M60L
YFGKLESKLSVIRNLNDQVLFIDQGNRPLFQDMTDSDSRDNAPRTIFIISMYKDSQPRGLAVTISVKSEKISTLSSENKIISFKEMNPPDNIKDTKSDIIFFQRSVPGHDNKMQFESSSYEGYFLASEKERDLFKLILKKEDELGDRSIMFTVQNED

SEQ ID NO: 912 - protein, 157 aa, synthetic construct
  source 1..157: note = human_IL18_4CS_E31Q_K67Q
YFGKLESKLSVIRNLNDQVLFIDQGNRPLFQDMTDSDSRDNAPRTIFIISMYKDSQPRGMAVTISVQSEKISTLSSENKIISFKEMNPPDNIKDTKSDIIFFQRSVPGHDNKMQFESSSYEGYFLASEKERDLFKLILKKEDELGDRSIMFTVQNED

SEQ ID NO: 913 - protein, 157 aa, synthetic construct
  source 1..157: note = human_IL18_4CS_E31Q_E69K
YFGKLESKLSVIRNLNDQVLFIDQGNRPLFQDMTDSDSRDNAPRTIFIISMYKDSQPRGMAVTISVKSKKISTLSSENKIISFKEMNPPDNIKDTKSDIIFFQRSVPGHDNKMQFESSSYEGYFLASEKERDLFKLILKKEDELGDRSIMFTVQNED

SEQ ID NO: 914 - protein, 157 aa, synthetic construct
  source 1..157: note = human_IL18_4CS_E31Q_I71M
YFGKLESKLSVIRNLNDQVLFIDQGNRPLFQDMTDSDSRDNAPRTIFIISMYKDSQPRGMAVTISVKSEKMSTLSSENKIISFKEMNPPDNIKDTKSDIIFFQRSVPGHDNKMQFESSSYEGYFLASEKERDLFKLILKKEDELGDRSIMFTVQNED

SEQ ID NO: 915 - protein, 157 aa, synthetic construct
  source 1..157: note = human_IL18_4CS_E31Q_E77K
YFGKLESKLSVIRNLNDQVLFIDQGNRPLFQDMTDSDSRDNAPRTIFIISMYKDSQPRGMAVTISVKSEKISTLSSKNKIISFKEMNPPDNIKDTKSDIIFFQRSVPGHDNKMQFESSSYEGYFLASEKERDLFKLILKKEDELGDRSIMFTVQNED

SEQ ID NO: 916 - protein, 157 aa, synthetic construct
  source 1..157: note = human_IL18_4CS_E31Q_I80T
YFGKLESKLSVIRNLNDQVLFIDQGNRPLFQDMTDSDSRDNAPRTIFIISMYKDSQPRGMAVTISVKSEKISTLSSENKTISFKEMNPPDNIKDTKSDIIFFQRSVPGHDNKMQFESSSYEGYFLASEKERDLFKLILKKEDELGDRSIMFTVQNED

SEQ ID NO: 917 - protein, 157 aa, synthetic construct
  source 1..157: note = human_IL18_4CS_E31Q_I81V
YFGKLESKLSVIRNLNDQVLFIDQGNRPLFQDMTDSDSRDNAPRTIFIISMYKDSQPRGMAVTISVKSEKISTLSSENKIVSFKEMNPPDNIKDTKSDIIFFQRSVPGHDNKMQFESSSYEGYFLASEKERDLFKLILKKEDELGDRSIMFTVQNED

SEQ ID NO: 918 - protein, 157 aa, synthetic construct
  source 1..157: note = human_IL18_4CS_E31Q_I81L
YFGKLESKLSVIRNLNDQVLFIDQGNRPLFQDMTDSDSRDNAPRTIFIISMYKDSQPRGMAVTISVKSEKISTLSSENKILSFKEMNPPDNIKDTKSDIIFFQRSVPGHDNKMQFESSSYEGYFLASEKERDLFKLILKKEDELGDRSIMFTVQNED

SEQ ID NO: 919 - protein, 157 aa, synthetic construct
  source 1..157: note = human_IL18_4CS_E31Q_N87S
YFGKLESKLSVIRNLNDQVLFIDQGNRPLFQDMTDSDSRDNAPRTIFIISMYKDSQPRGMAVTISVKSEKISTLSSENKIISFKEMSPPDNIKDTKSDIIFFQRSVPGHDNKMQFESSSYEGYFLASEKERDLFKLILKKEDELGDRSIMFTVQNED

SEQ ID NO: 920 - protein, 157 aa, synthetic construct
  source 1..157: note = human_IL18_4CS_E31Q_D90E
YFGKLESKLSVIRNLNDQVLFIDQGNRPLFQDMTDSDSRDNAPRTIFIISMYKDSQPRGMAVTISVKSEKISTLSSENKIISFKEMNPPENIKDTKSDIIFFQRSVPGHDNKMQFESSSYEGYFLASEKERDLFKLILKKEDELGDRSIMFTVQNED

SEQ ID NO: 921 - protein, 157 aa, synthetic construct
  source 1..157: note = human_IL18_4CS_E31Q_K93D_T95E
YFGKLESKLSVIRNLNDQVLFIDQGNRPLFQDMTDSDSRDNAPRTIFIISMYKDSQPRGMAVTISVKSEKISTLSSENKIISFKEMNPPDNIDDEKSDIIFFQRSVPGHDNKMQFESSSYEGYFLASEKERDLFKLILKKEDELGDRSIMFTVQNED

SEQ ID NO: 922 - protein, 157 aa, synthetic construct
  source 1..157: note = human_IL18_4CS_E31Q_K93N_T95E
YFGKLESKLSVIRNLNDQVLFIDQGNRPLFQDMTDSDSRDNAPRTIFIISMYKDSQPRGMAVTISVKSEKISTLSSENKIISFKEMNPPDNINDEKSDIIFFQRSVPGHDNKMQFESSSYEGYFLASEKERDLFKLILKKEDELGDRSIMFTVQNED

SEQ ID NO: 923 - protein, 157 aa, synthetic construct
  source 1..157: note = human_IL18_4CS_E31Q_T95E
YFGKLESKLSVIRNLNDQVLFIDQGNRPLFQDMTDSDSRDNAPRTIFIISMYKDSQPRGMAVTISVKSEKISTLSSENKIISFKEMNPPDNIKDEKSDIIFFQRSVPGHDNKMQFESSSYEGYFLASEKERDLFKLILKKEDELGDRSIMFTVQNED

SEQ ID NO: 924 - protein, 157 aa, synthetic construct
  source 1..157: note = human_IL18_4CS_E31Q_K96G
YFGKLESKLSVIRNLNDQVLFIDQGNRPLFQDMTDSDSRDNAPRTIFIISMYKDSQPRGMAVTISVKSEKISTLSSENKIISFKEMNPPDNIKDTGSDIIFFQRSVPGHDNKMQFESSSYEGYFLASEKERDLFKLILKKEDELGDRSIMFTVQNED

SEQ ID NO: 925 - protein, 157 aa, synthetic construct
  source 1..157: note = human_IL18_4CS_E31Q_S97N
YFGKLESKLSVIRNLNDQVLFIDQGNRPLFQDMTDSDSRDNAPRTIFIISMYKDSQPRGMAVTISVKSEKISTLSSENKIISFKEMNPPDNIKDTKNDIIFFQRSVPGHDNKMQFESSSYEGYFLASEKERDLFKLILKKEDELGDRSIMFTVQNED

SEQ ID NO: 926 - protein, 157 aa, synthetic construct
  source 1..157: note = human_IL18_4CS_E31Q_N111D
YFGKLESKLSVIRNLNDQVLFIDQGNRPLFQDMTDSDSRDNAPRTIFIISMYKDSQPRGMAVTISVKSEKISTLSSENKIISFKEMNPPDNIKDTKSDIIFFQRSVPGHDDKMQFESSSYEGYFLASEKERDLFKLILKKEDELGDRSIMFTVQNED

SEQ ID NO: 927 - protein, 157 aa, synthetic construct
  source 1..157: note = human_IL18_4CS_E31Q_M113I
YFGKLESKLSVIRNLNDQVLFIDQGNRPLFQDMTDSDSRDNAPRTIFIISMYKDSQPRGMAVTISVKSEKISTLSSENKIISFKEMNPPDNIKDTKSDIIFFQRSVPGHDNKIQFESSSYEGYFLASEKERDLFKLILKKEDELGDRSIMFTVQNED

SEQ ID NO: 928 - protein, 157 aa, synthetic construct
  source 1..157: note = human_IL18_4CS_E31Q_S119L
YFGKLESKLSVIRNLNDQVLFIDQGNRPLFQDMTDSDSRDNAPRTIFIISMYKDSQPRGMAVTISVKSEKISTLSSENKIISFKEMNPPDNIKDTKSDIIFFQRSVPGHDNKMQFESSLYEGYFLASEKERDLFKLILKKEDELGDRSIMFTVQNED

SEQ ID NO: 929 - protein, 157 aa, synthetic construct
  source 1..157: note = human_IL18_4CS_E31Q_L144N
YFGKLESKLSVIRNLNDQVLFIDQGNRPLFQDMTDSDSRDNAPRTIFIISMYKDSQPRGMAVTISVKSEKISTLSSENKIISFKEMNPPDNIKDTKSDIIFFQRSVPGHDNKMQFESSSYEGYFLASEKERDLFKLILKKEDENGDRSIMFTVQNED

SEQ ID NO: 930 - protein, 157 aa, synthetic construct
  source 1..157: note = human_IL18_4CS_E31Q_R147K
YFGKLESKLSVIRNLNDQVLFIDQGNRPLFQDMTDSDSRDNAPRTIFIISMYKDSQPRGMAVTISVKSEKISTLSSENKIISFKEMNPPDNIKDTKSDIIFFQRSVPGHDNKMQFESSSYEGYFLASEKERDLFKLILKKEDELGDKSIMFTVQNED

SEQ ID NO: 931 - protein, 157 aa, synthetic construct
  source 1..157: note = human_IL18_4CS_E31Q_I149V
YFGKLESKLSVIRNLNDQVLFIDQGNRPLFQDMTDSDSRDNAPRTIFIISMYKDSQPRGMAVTISVKSEKISTLSSENKIISFKEMNPPDNIKDTKSDIIFFQRSVPGHDNKMQFESSSYEGYFLASEKERDLFKLILKKEDELGDRSVMFTVQNED

SEQ ID NO: 932 - protein, 157 aa, synthetic construct
  source 1..157: note = human_IL18_4CS_E31Q_M150T
YFGKLESKLSVIRNLNDQVLFIDQGNRPLFQDMTDSDSRDNAPRTIFIISMYKDSQPRGMAVTISVKSEKISTLSSENKIISFKEMNPPDNIKDTKSDIIFFQRSVPGHDNKMQFESSSYEGYFLASEKERDLFKLILKKEDELGDRSITFTVQNED

SEQ ID NO: 933 - protein, 157 aa, synthetic construct
  source 1..157: note = human_IL18_4CS_E31Q_E156Q_D157N
YFGKLESKLSVIRNLNDQVLFIDQGNRPLFQDMTDSDSRDNAPRTIFIISMYKDSQPRGMAVTISVKSEKISTLSSENKIISFKEMNPPDNIKDTKSDIIFFQRSVPGHDNKMQFESSSYEGYFLASEKERDLFKLILKKEDELGDRSIMFTVQNQN

SEQ ID NO: 934 - protein, 157 aa, synthetic construct
  source 1..157: note = human_IL18_4CS_E31Q_S38E
YFGKLESKLSVIRNLNDQVLFIDQGNRPLFQDMTDSDERDNAPRTIFIISMYKDSQPRGMAVTISVKSEKISTLSSENKIISFKEMNPPDNIKDTKSDIIFFQRSVPGHDNKMQFESSSYEGYFLASEKERDLFKLILKKEDELGDRSIMFTVQNED

SEQ ID NO: 935 - protein, 157 aa, synthetic construct
  source 1..157: note = human_IL18_4CS_E31Q_S38L
YFGKLESKLSVIRNLNDQVLFIDQGNRPLFQDMTDSDLRDNAPRTIFIISMYKDSQPRGMAVTISVKSEKISTLSSENKIISFKEMNPPDNIKDTKSDIIFFQRSVPGHDNKMQFESSSYEGYFLASEKERDLFKLILKKEDELGDRSIMFTVQNED

SEQ ID NO: 936 - protein, 157 aa, synthetic construct
  source 1..157: note = human_IL18_4CS_E31Q_S38I
YFGKLESKLSVIRNLNDQVLFIDQGNRPLFQDMTDSDIRDNAPRTIFIISMYKDSQPRGMAVTISVKSEKISTLSSENKIISFKEMNPPDNIKDTKSDIIFFQRSVPGHDNKMQFESSSYEGYFLASEKERDLFKLILKKEDELGDRSIMFTVQNED

SEQ ID NO: 937 - protein, 157 aa, synthetic construct
  source 1..157: note = human_IL18_4CS_E31Q_S38V
YFGKLESKLSVIRNLNDQVLFIDQGNRPLFQDMTDSDVRDNAPRTIFIISMYKDSQPRGMAVTISVKSEKISTLSSENKIISFKEMNPPDNIKDTKSDIIFFQRSVPGHDNKMQFESSSYEGYFLASEKERDLFKLILKKEDELGDRSIMFTVQNED

SEQ ID NO: 938 - protein, 157 aa, synthetic construct
  source 1..157: note = human_IL18_4CS_E31Q_S68N
YFGKLESKLSVIRNLNDQVLFIDQGNRPLFQDMTDSDSRDNAPRTIFIISMYKDSQPRGMAVTISVKNEKISTLSSENKIISFKEMNPPDNIKDTKSDIIFFQRSVPGHDNKMQFESSSYEGYFLASEKERDLFKLILKKEDELGDRSIMFTVQNED

SEQ ID NO: 939 - protein, 157 aa, synthetic construct
  source 1..157: note = human_IL18_4CS_E31Q_S68E
YFGKLESKLSVIRNLNDQVLFIDQGNRPLFQDMTDSDSRDNAPRTIFIISMYKDSQPRGMAVTISVKEEKISTLSSENKIISFKEMNPPDNIKDTKSDIIFFQRSVPGHDNKMQFESSSYEGYFLASEKERDLFKLILKKEDELGDRSIMFTVQNED

SEQ ID NO: 940 - protein, 157 aa, synthetic construct
  source 1..157: note = human_IL18_4CS_E31Q_S68Q
YFGKLESKLSVIRNLNDQVLFIDQGNRPLFQDMTDSDSRDNAPRTIFIISMYKDSQPRGMAVTISVKQEKISTLSSENKIISFKEMNPPDNIKDTKSDIIFFQRSVPGHDNKMQFESSSYEGYFLASEKERDLFKLILKKEDELGDRSIMFTVQNED

SEQ ID NO: 941 - protein, 157 aa, synthetic construct
  source 1..157: note = human_IL18_4CS_E31Q_S76C
YFGKLESKLSVIRNLNDQVLFIDQGNRPLFQDMTDSDSRDNAPRTIFIISMYKDSQPRGMAVTISVKSEKISTLSCENKIISFKEMNPPDNIKDTKSDIIFFQRSVPGHDNKMQFESSSYEGYFLASEKERDLFKLILKKEDELGDRSIMFTVQNED

SEQ ID NO: 942 - protein, 157 aa, synthetic construct
  source 1..157: note = human_IL18_4CS_E31Q_S127D
YFGKLESKLSVIRNLNDQVLFIDQGNRPLFQDMTDSDSRDNAPRTIFIISMYKDSQPRGMAVTISVKSEKISTLSSENKIISFKEMNPPDNIKDTKSDIIFFQRSVPGHDNKMQFESSSYEGYFLADEKERDLFKLILKKEDELGDRSIMFTVQNED

SEQ ID NO: 943 - protein, 157 aa, synthetic construct
  source 1..157: note = human_IL18_4CS_E31Q_S127E
YFGKLESKLSVIRNLNDQVLFIDQGNRPLFQDMTDSDSRDNAPRTIFIISMYKDSQPRGMAVTISVKSEKISTLSSENKIISFKEMNPPDNIKDTKSDIIFFQRSVPGHDNKMQFESSSYEGYFLAEEKERDLFKLILKKEDELGDRSIMFTVQNED

SEQ ID NO: 944 - protein, 157 aa, synthetic construct
  source 1..157: note = human_IL18_4CS_D23N_E31Q_R27Q
YFGKLESKLSVIRNLNDQVLFINQGNQPLFQDMTDSDSRDNAPRTIFIISMYKDSQPRGMAVTISVKSEKISTLSSENKIISFKEMNPPDNIKDTKSDIIFFQRSVPGHDNKMQFESSSYEGYFLASEKERDLFKLILKKEDELGDRSIMFTVQNED

SEQ ID NO: 945 - protein, 157 aa, synthetic construct
  source 1..157: note = human_IL18_4CS_E31Q_Q56L_T95E
YFGKLESKLSVIRNLNDQVLFIDQGNRPLFQDMTDSDSRDNAPRTIFIISMYKDSLPRGMAVTISVKSEKISTLSSENKIISFKEMNPPDNIKDEKSDIIFFQRSVPGHDNKMQFESSSYEGYFLASEKERDLFKLILKKEDELGDRSIMFTVQNED

SEQ ID NO: 946 - protein, 157 aa, synthetic construct
  source 1..157: note = human_IL18_4CS_E31Q_K96Q_S119L
YFGKLESKLSVIRNLNDQVLFIDQGNRPLFQDMTDSDSRDNAPRTIFIISMYKDSQPRGMAVTISVKSEKISTLSSENKIISFKEMNPPDNIKDTQSDIIFFQRSVPGHDNKMQFESSLYEGYFLASEKERDLFKLILKKEDELGDRSIMFTVQNED

SEQ ID NO: 947 - protein, 157 aa, synthetic construct
  source 1..157: note = human_IL18_4CS_E31Q_E141K_I149V
YFGKLESKLSVIRNLNDQVLFIDQGNRPLFQDMTDSDSRDNAPRTIFIISMYKDSQPRGMAVTISVKSEKISTLSSENKIISFKEMNPPDNIKDTKSDIIFFQRSVPGHDNKMQFESSSYEGYFLASEKERDLFKLILKKKDELGDRSVMFTVQNED

SEQ ID NO: 948 - protein, 157 aa, synthetic construct
  source 1..157: note = human_IL18_4CS_E31Q_E141Q_I149V
YFGKLESKLSVIRNLNDQVLFIDQGNRPLFQDMTDSDSRDNAPRTIFIISMYKDSQPRGMAVTISVKSEKISTLSSENKIISFKEMNPPDNIKDTKSDIIFFQRSVPGHDNKMQFESSSYEGYFLASEKERDLFKLILKKQDELGDRSVMFTVQNED

SEQ ID NO: 949 - protein, 157 aa, synthetic construct
  source 1..157: note = human_IL18_4CS_S7P_E31Q_S50Y
YFGKLEPKLSVIRNLNDQVLFIDQGNRPLFQDMTDSDSRDNAPRTIFIIYMYKDSQPRGMAVTISVKSEKISTLSSENKIISFKEMNPPDNIKDTKSDIIFFQRSVPGHDNKMQFESSSYEGYFLASEKERDLFKLILKKEDELGDRSIMFTVQNED

SEQ ID NO: 950 - protein, 231 aa, synthetic construct
  source 1..231: note = XENP34110 Chain 1 - empty_Fc_Fc(216)_IgG1_pI(-)_Isosteric_A_C220S/PVA_/S267K/L3 68D/K370S
EPKSSDKTHTCPPCPAPPVAGPSVFLFPPKPKDTLMISRTPEVTCVVVDVKHEDPEVKFNWYVDGVEVHNAKTKPREEEYNSTYRVVSVLTVLHQDWLNGKEYKCKVSNKALPAPIEKTISKAKGQPREPQVYTLPPSREEMTKNQVSLTCDVSGFYPSDIAVEWESDGQPENNYKTTPPVLDSDGSFFLYSKLTVDKSRWEQGDVFSCSVMHEALHNHYTQKSLSLSPGK

SEQ ID NO: 951 - protein, 393 aa, synthetic construct
  source 1..393: note = XENP34110 Chain 2 - human_IL18_4CS_(GGGGS)1_Fc(216)_IgG1_C220S/PVA_/S267K/S364K /E357Q
YFGKLESKLSVIRNLNDQVLFIDQGNRPLFEDMTDSDSRDNAPRTIFIISMYKDSQPRGMAVTISVKSEKISTLSSENKIISFKEMNPPDNIKDTKSDIIFFQRSVPGHDNKMQFESSSYEGYFLASEKERDLFKLILKKEDELGDRSIMFTVQNEDGGGGSEPKSSDKTHTCPPCPAPPVAGPSVFLFPPKPKDTLMISRTPEVTCVVVDVKHEDPEVKFNWYVDGVEVHNAKTKPREEQYNSTYRVVSVLTVLHQDWLNGKEYKCKVSNKALPAPIEKTISKAKGQPREPQVYTLPPSREQMTKNQVKLTCLVKGFYPSDIAVEWESNGQPENNYKTTPPVLDSDGSFFLYSKLTVDKSRWQQGNVFSCSVMHEALHNHYTQKSLSLSPGK

SEQ ID NO: 952 - protein, 231 aa, synthetic construct; identical to SEQ ID NO: 950
  source 1..231: note = XENP34111 Chain 1 - empty_Fc_Fc(216)_IgG1_pI(-)_Isosteric_A_C220S/PVA_/S267K/L3 68D/K370S

SEQ ID NO: 953 - protein, 393 aa, synthetic construct
  source 1..393: note = XENP34111 Chain 2 - human_IL18_4CS_S38K_(GGGGS)1_Fc(216)_IgG1_C220S/PVA_/S267K/ S364K/E357Q
YFGKLESKLSVIRNLNDQVLFIDQGNRPLFEDMTDSDKRDNAPRTIFIISMYKDSQPRGMAVTISVKSEKISTLSSENKIISFKEMNPPDNIKDTKSDIIFFQRSVPGHDNKMQFESSSYEGYFLASEKERDLFKLILKKEDELGDRSIMFTVQNEDGGGGSEPKSSDKTHTCPPCPAPPVAGPSVFLFPPKPKDTLMISRTPEVTCVVVDVKHEDPEVKFNWYVDGVEVHNAKTKPREEQYNSTYRVVSVLTVLHQDWLNGKEYKCKVSNKALPAPIEKTISKAKGQPREPQVYTLPPSREQMTKNQVKLTCLVKGFYPSDIAVEWESNGQPENNYKTTPPVLDSDGSFFLYSKLTVDKSRWQQGNVFSCSVMHEALHNHYTQKSLSLSPGK

SEQ ID NO: 954 - protein, 231 aa, synthetic construct; identical to SEQ ID NO: 950
  source 1..231: note = XENP34112 Chain 1 - empty_Fc_Fc(216)_IgG1_pI(-)_Isosteric_A_C220S/PVA_/S267K/L3 68D/K370S

SEQ ID NO: 955 - protein, 393 aa, synthetic construct
  source 1..393: note = XENP34112 Chain 2 - human_IL18_4CS_S68K_(GGGGS)1_Fc(216)_IgG1_C220S/PVA_/S267K/ S364K/E357Q
YFGKLESKLSVIRNLNDQVLFIDQGNRPLFEDMTDSDSRDNAPRTIFIISMYKDSQPRGMAVTISVKKEKISTLSSENKIISFKEMNPPDNIKDTKSDIIFFQRSVPGHDNKMQFESSSYEGYFLASEKERDLFKLILKKEDELGDRSIMFTVQNEDGGGGSEPKSSDKTHTCPPCPAPPVAGPSVFLFPPKPKDTLMISRTPEVTCVVVDVKHEDPEVKFNWYVDGVEVHNAKTKPREEQYNSTYRVVSVLTVLHQDWLNGKEYKCKVSNKALPAPIEKTISKAKGQPREPQVYTLPPSREQMTKNQVKLTCLVKGFYPSDIAVEWESNGQPENNYKTTPPVLDSDGSFFLYSKLTVDKSRWQQGNVFSCSVMHEALHNHYTQKSLSLSPGK

SEQ ID NO: 956 - protein, 231 aa, synthetic construct; identical to SEQ ID NO: 950
  source 1..231: note = XENP34113 Chain 1 - empty_Fc_Fc(216)_IgG1_pI(-)_Isosteric_A_C220S/PVA_/S267K/L3 68D/K370S

SEQ ID NO: 957 - protein, 393 aa, synthetic construct
  source 1..393: note = XENP34113 Chain 2 - human_IL18_4CS_S76K_(GGGGS)1_Fc(216)_IgG1_C220S/PVA_/S267K/ S364K/E357Q
YFGKLESKLSVIRNLNDQVLFIDQGNRPLFEDMTDSDSRDNAPRTIFIISMYKDSQPRGMAVTISVKSEKISTLSKENKIISFKEMNPPDNIKDTKSDIIFFQRSVPGHDNKMQFESSSYEGYFLASEKERDLFKLILKKEDELGDRSIMFTVQNEDGGGGSEPKSSDKTHTCPPCPAPPVAGPSVFLFPPKPKDTLMISRTPEVTCVVVDVKHEDPEVKFNWYVDGVEVHNAKTKPREEQYNSTYRVVSVLTVLHQDWLNGKEYKCKVSNKALPAPIEKTISKAKGQPREPQVYTLPPSREQMTKNQVKLTCLVKGFYPSDIAVEWESNGQPENNYKTTPPVLDSDGSFFLYSKLTVDKSRWQQGNVFSCSVMHEALHNHYTQKSLSLSPGK

SEQ ID NO: 958 - protein, 231 aa, synthetic construct; identical to SEQ ID NO: 950
  source 1..231: note = XENP34114 Chain 1 - empty_Fc_Fc(216)_IgG1_pI(-)_Isosteric_A_C220S/PVA_/S267K/L3 68D/K370S

SEQ ID NO: 959 - protein, 393 aa, synthetic construct
  source 1..393: note = XENP34114 Chain 2 - human_IL18_4CS_S127K_(GGGGS)1_Fc(216)_IgG1_C220S/PVA_/S267K /S364K/E357Q
YFGKLESKLSVIRNLNDQVLFIDQGNRPLFEDMTDSDSRDNAPRTIFIISMYKDSQPRGMAVTISVKSEKISTLSSENKIISFKEMNPPDNIKDTKSDIIFFQRSVPGHDNKMQFESSSYEGYFLAKEKERDLFKLILKKEDELGDRSIMFTVQNEDGGGGSEPKSSDKTHTCPPCPAPPVAGPSVFLFPPKPKDTLMISRTPEVTCVVVDVKHEDPEVKFNWYVDGVEVHNAKTKPREEQYNSTYRVVSVLTVLHQDWLNGKEYKCKVSNKALPAPIEKTISKAKGQPREPQVYTLPPSREQMTKNQVKLTCLVKGFYPSDIAVEWESNGQPENNYKTTPPVLDSDGSFFLYSKLTVDKSRWQQGNVFSCSVMHEALHNHYTQKSLSLSPGK

SEQ ID NO: 960 - protein, 387 aa, synthetic construct; identical to SEQ ID NO: 459
  source 1..387: note = XENP40685 Chain 1 - human_IL18_4CS_S10C_E31Q_N155C_Fc(216)_IgG1_pI(-)_Isosteric _A_C220S/PVA_/S267K/L368D/K370S/K447del

SEQ ID NO: 961 - protein, 230 aa, synthetic construct; identical to SEQ ID NO: 260
  source 1..230: note = XENP40685 Chain 2 - empty_Fc(216)_IgG1_PVA_/S267K/S364K/E357Q/K447del

SEQ ID NO: 962 - protein, 387 aa, synthetic construct
  source 1..387: note = XENP40962 Chain 1 - human_IL18_4CS_E6Q_S10C_K53D_N155C_Fc(216)_IgG1_pI(-)_Isost eric_A_C220S/PVA_/S267K/L368D/K370S/K447del
YFGKLQSKLCVIRNLNDQVLFIDQGNRPLFEDMTDSDSRDNAPRTIFIISMYDDSQPRGMAVTISVKSEKISTLSSENKIISFKEMNPPDNIKDTKSDIIFFQRSVPGHDNKMQFESSSYEGYFLASEKERDLFKLILKKEDELGDRSIMFTVQCEDEPKSSDKTHTCPPCPAPPVAGPSVFLFPPKPKDTLMISRTPEVTCVVVDVKHEDPEVKFNWYVDGVEVHNAKTKPREEEYNSTYRVVSVLTVLHQDWLNGKEYKCKVSNKALPAPIEKTISKAKGQPREPQVYTLPPSREEMTKNQVSLTCDVSGFYPSDIAVEWESDGQPENNYKTTPPVLDSDGSFFLYSKLTVDKSRWEQGDVFSCSVMHEALHNHYTQKSLSLSPG

SEQ ID NO: 963 - protein, 230 aa, synthetic construct; identical to SEQ ID NO: 260
  source 1..230: note = XENP40962 Chain 2 - empty_Fc(216)_IgG1_PVA_/S267K/S364K/E357Q/K447del

SEQ ID NO: 964 - protein, 387 aa, synthetic construct
  source 1..387: note = XENP40963 Chain 1 - human_IL18_4CS_E6Q_S10C_M51K_K53D_N155C_Fc(216)_IgG1_pI(-)_ Isosteric_A_C220S/PVA_/S267K/L368D/K370S/K447del
YFGKLQSKLCVIRNLNDQVLFIDQGNRPLFEDMTDSDSRDNAPRTIFIISKYDDSQPRGMAVTISVKSEKISTLSSENKIISFKEMNPPDNIKDTKSDIIFFQRSVPGHDNKMQFESSSYEGYFLASEKERDLFKLILKKEDELGDRSIMFTVQCEDEPKSSDKTHTCPPCPAPPVAGPSVFLFPPKPKDTLMISRTPEVTCVVVDVKHEDPEVKFNWYVDGVEVHNAKTKPREEEYNSTYRVVSVLTVLHQDWLNGKEYKCKVSNKALPAPIEKTISKAKGQPREPQVYTLPPSREEMTKNQVSLTCDVSGFYPSDIAVEWESDGQPENNYKTTPPVLDSDGSFFLYSKLTVDKSRWEQGDVFSCSVMHEALHNHYTQKSLSLSPG

SEQ ID NO: 965 - protein, 230 aa, synthetic construct; identical to SEQ ID NO: 260
  source 1..230: note = XENP40963 Chain 2 - empty_Fc(216)_IgG1_PVA_/S267K/S364K/E357Q/K447del

SEQ ID NO: 966 - protein, 387 aa, synthetic construct
  source 1..387: note = XENP40964 Chain 1 - human_IL18_4CS_S10C_E31Q_D35N_N41Q_K53A_N155C_Fc(216)_IgG1_ pI(-)_Isosteric_A_C220S/PVA_/S267K/L368D/K370S/K447del
YFGKLESKLCVIRNLNDQVLFIDQGNRPLFQDMTNSDSRDQAPRTIFIISMYADSQPRGMAVTISVKSEKISTLSSENKIISFKEMNPPDNIKDTKSDIIFFQRSVPGHDNKMQFESSSYEGYFLASEKERDLFKLILKKEDELGDRSIMFTVQCEDEPKSSDKTHTCPPCPAPPVAGPSVFLFPPKPKDTLMISRTPEVTCVVVDVKHEDPEVKFNWYVDGVEVHNAKTKPREEEYNSTYRVVSVLTVLHQDWLNGKEYKCKVSNKALPAPIEKTISKAKGQPREPQVYTLPPSREEMTKNQVSLTCDVSGFYPSDIAVEWESDGQPENNYKTTPPVLDSDGSFFLYSKLTVDKSRWEQGDVFSCSVMHEALHNHYTQKSLSLSPG

SEQ ID NO: 967 - protein, 230 aa, synthetic construct; identical to SEQ ID NO: 260
  source 1..230: note = XENP40964 Chain 2 - empty_Fc(216)_IgG1_PVA_/S267K/S364K/E357Q/K447del

SEQ ID NO: 968 - protein, 387 aa, synthetic construct
  source 1..387: note = XENP40965 Chain 1 - human_IL18_4CS_S10C_E31Q_N41Q_K53A_N155C_Fc(216)_IgG1_pI(-) _Isosteric_A_C220S/PVA_/S267K/L368D/K370S/K447del
YFGKLESKLCVIRNLNDQVLFIDQGNRPLFQDMTDSDSRDQAPRTIFIISMYADSQPRGMAVTISVKSEKISTLSSENKIISFKEMNPPDNIKDTKSDIIFFQRSVPGHDNKMQFESSSYEGYFLASEKERDLFKLILKKEDELGDRSIMFTVQCEDEPKSSDKTHTCPPCPAPPVAGPSVFLFPPKPKDTLMISRTPEVTCVVVDVKHEDPEVKFNWYVDGVEVHNAKTKPREEEYNSTYRVVSVLTVLHQDWLNGKEYKCKVSNKALPAPIEKTISKAKGQPREPQVYTLPPSREEMTKNQVSLTCDVSGFYPSDIAVEWESDGQPENNYKTTPPVLDSDGSFFLYSKLTVDKSRWEQGDVFSCSVMHEALHNHYTQKSLSLSPG

SEQ ID NO: 969 - protein, 230 aa, synthetic construct; identical to SEQ ID NO: 260
  source 1..230: note = XENP40965 Chain 2 - empty_Fc(216)_IgG1_PVA_/S267K/S364K/E357Q/K447del

SEQ ID NO: 970 - protein, 387 aa, synthetic construct
  source 1..387: note = XENP40966 Chain 1 - human_IL18_4CS_S10C_E31Q_K53A_N155C_Fc(216)_IgG1_pI(-)_Isos teric_A_C220S/PVA_/S267K/L368D/K370S/K447del
YFGKLESKLCVIRNLNDQVLFIDQGNRPLFQDMTDSDSRDNAPRTIFIISMYADSQPRGMAVTISVKSEKISTLSSENKIISFKEMNPPDNIKDTKSDIIFFQRSVPGHDNKMQFESSSYEGYFLASEKERDLFKLILKKEDELGDRSIMFTVQCEDEPKSSDKTHTCPPCPAPPVAGPSVFLFPPKPKDTLMISRTPEVTCVVVDVKHEDPEVKFNWYVDGVEVHNAKTKPREEEYNSTYRVVSVLTVLHQDWLNGKEYKCKVSNKALPAPIEKTISKAKGQPREPQVYTLPPSREEMTKNQVSLTCDVSGFYPSDIAVEWESDGQPENNYKTTPPVLDSDGSFFLYSKLTVDKSRWEQGDVFSCSVMHEALHNHYTQKSLSLSPG

SEQ ID NO: 971 - protein, 230 aa, synthetic construct; identical to SEQ ID NO: 260
  source 1..230: note = XENP40966 Chain 2 - empty_Fc(216)_IgG1_PVA_/S267K/S364K/E357Q/K447del

SEQ ID NO: 972 - protein, 387 aa, synthetic construct
  source 1..387: note = XENP40967 Chain 1 - human_IL18_4CS_S10C_K53T_N155C_Fc(216)_IgG1_pI(-)_Isosteric _A_C220S/PVA_/S267K/L368D/K370S/K447del
YFGKLESKLCVIRNLNDQVLFIDQGNRPLFEDMTDSDSRDNAPRTIFIISMYTDSQPRGMAVTISVKSEKISTLSSENKIISFKEMNPPDNIKDTKSDIIFFQRSVPGHDNKMQFESSSYEGYFLASEKERDLFKLILKKEDELGDRSIMFTVQCEDEPKSSDKTHTCPPCPAPPVAGPSVFLFPPKPKDTLMISRTPEVTCVVVDVKHEDPEVKFNWYVDGVEVHNAKTKPREEEYNSTYRVVSVLTVLHQDWLNGKEYKCKVSNKALPAPIEKTISKAKGQPREPQVYTLPPSREEMTKNQVSLTCDVSGFYPSDIAVEWESDGQPENNYKTTPPVLDSDGSFFLYSKLTVDKSRWEQGDVFSCSVMHEALHNHYTQKSLSLSPG

SEQ ID NO: 973 - protein, 230 aa, synthetic construct; identical to SEQ ID NO: 260
  source 1..230: note = XENP40967 Chain 2 - empty_Fc(216)_IgG1_PVA_/S267K/S364K/E357Q/K447del

SEQ ID NO: 974 - protein, 387 aa, synthetic construct
  source 1..387: note = XENP40968 Chain 1 - human_IL18_4CS_S10C_P57A_N155C_Fc(216)_IgG1_pI(-)_Isosteric _A_C220S/PVA_/S267K/L368D/K370S/K447del
YFGKLESKLCVIRNLNDQVLFIDQGNRPLFEDMTDSDSRDNAPRTIFIISMYKDSQARGMAVTISVKSEKISTLSSENKIISFKEMNPPDNIKDTKSDIIFFQRSVPGHDNKMQFESSSYEGYFLASEKERDLFKLILKKEDELGDRSIMFTVQCEDEPKSSDKTHTCPPCPAPPVAGPSVFLFPPKPKDTLMISRTPEVTCVVVDVKHEDPEVKFNWYVDGVEVHNAKTKPREEEYNSTYRVVSVLTVLHQDWLNGKEYKCKVSNKALPAPIEKTISKAKGQPREPQVYTLPPSREEMTKNQVSLTCDVSGFYPSDIAVEWESDGQPENNYKTTPPVLDSDGSFFLYSKLTVDKSRWEQGDVFSCSVMHEALHNHYTQKSLSLSPG

SEQ ID NO: 975 - protein, 230 aa, synthetic construct; identical to SEQ ID NO: 260
  source 1..230: note = XENP40968 Chain 2 - empty_Fc(216)_IgG1_PVA_/S267K/S364K/E357Q/K447del

SEQ ID NO: 976 - protein, 387 aa, synthetic construct
  source 1..387: note = XENP41756 Chain 1 - human_IL18_4CS_S10C_N155C_Fc(216)_IgG1_pI(-)_Isosteric_A_C2 20S/PVA_/S267K/L368D/K370S/K447del
YFGKLESKLCVIRNLNDQVLFIDQGNRPLFEDMTDSDSRDNAPRTIFIISMYKDSQPRGMAVTISVKSEKISTLSSENKIISFKEMNPPDNIKDTKSDIIFFQRSVPGHDNKMQFESSSYEGYFLASEKERDLFKLILKKEDELGDRSIMFTVQCEDEPKSSDKTHTCPPCPAPPVAGPSVFLFPPKPKDTLMISRTPEVTCVVVDVKHEDPEVKFNWYVDGVEVHNAKTKPREEEYNSTYRVVSVLTVLHQDWLNGKEYKCKVSNKALPAPIEKTISKAKGQPREPQVYTLPPSREEMTKNQVSLTCDVSGFYPSDIAVEWESDGQPENNYKTTPPVLDSDGSFFLYSKLTVDKSRWEQGDVFSCSVMHEALHNHYTQKSLSLSPG

SEQ ID NO: 977 - protein, 230 aa, synthetic construct; identical to SEQ ID NO: 260
  source 1..230: note = XENP41756 Chain 2 - empty_Fc(216)_IgG1_PVA_/S267K/S364K/E357Q/K447del

SEQ ID NO: 978 - protein, 387 aa, synthetic construct
  source 1..387: note = XENP41757 Chain 1 - human_IL18_4CS_S10C_M51L_K53D_S55T_D110R_N111T_N155C_Fc(216 )_IgG1_pI(-)_Isosteric_A_C220S/PVA_/S267K/L368D/K370S/K447d el
YFGKLESKLCVIRNLNDQVLFIDQGNRPLFEDMTDSDSRDNAPRTIFIISLYDDTQPRGMAVTISVKSEKISTLSSENKIISFKEMNPPDNIKDTKSDIIFFQRSVPGHRTKMQFESSSYEGYFLASEKERDLFKLILKKEDELGDRSIMFTVQCEDEPKSSDKTHTCPPCPAPPVAGPSVFLFPPKPKDTLMISRTPEVTCVVVDVKHEDPEVKFNWYVDGVEVHNAKTKPREEEYNSTYRVVSVLTVLHQDWLNGKEYKCKVSNKALPAPIEKTISKAKGQPREPQVYTLPPSREEMTKNQVSLTCDVSGFYPSDIAVEWESDGQPENNYKTTPPVLDSDGSFFLYSKLTVDKSRWEQGDVFSCSVMHEALHNHYTQKSLSLSPG

SEQ ID NO: 979 - protein, 230 aa, synthetic construct; identical to SEQ ID NO: 260
  source 1..230: note = XENP41757 Chain 2 - empty_Fc(216)_IgG1_PVA_/S267K/S364K/E357Q/K447del

SEQ ID NO: 980 - protein, 387 aa, synthetic construct
  source 1..387: note = XENP41758 Chain 1 - human_IL18_4CS_S10C_K53D_S55T_D110R_N111T_N155C_Fc(216)_IgG 1_pI(-)_Isosteric_A_C220S/PVA_/S267K/L368D/K370S/K447del
YFGKLESKLCVIRNLNDQVLFIDQGNRPLFEDMTDSDSRDNAPRTIFIISMYDDTQPRGMAVTISVKSEKISTLSSENKIISFKEMNPPDNIKDTKSDIIFFQRSVPGHRTKMQFESSSYEGYFLASEKERDLFKLILKKEDELGDRSIMFTVQCEDEPKSSDKTHTCPPCPAPPVAGPSVFLFPPKPKDTLMISRTPEVTCVVVDVKHEDPEVKFNWYVDGVEVHNAKTKPREEEYNSTYRVVSVLTVLHQDWLNGKEYKCKVSNKALPAPIEKTISKAKGQPREPQVYTLPPSREEMTKNQVSLTCDVSGFYPSDIAVEWESDGQPENNYKTTPPVLDSDGSFFLYSKLTVDKSRWEQGDVFSCSVMHEALHNHYTQKSLSLSPG

SEQ ID NO: 981 - protein, 230 aa, synthetic construct; identical to SEQ ID NO: 260
  source 1..230: note = XENP41758 Chain 2 - empty_Fc(216)_IgG1_PVA_/S267K/S364K/E357Q/K447del

SEQ ID NO: 982 - protein, 387 aa, synthetic construct
  source 1..387: note = XENP41759 Chain 1 - human_IL18_4CS_S10C_K53D_S55T_N111T_N155C_Fc(216)_IgG1_pI(- )_Isosteric_A_C220S/PVA_/S267K/L368D/K370S/K447del
YFGKLESKLCVIRNLNDQVLFIDQGNRPLFEDMTDSDSRDNAPRTIFIISMYDDTQPRGMAVTISVKSEKISTLSSENKIISFKEMNPPDNIKDTKSDIIFFQRSVPGHDTKMQFESSSYEGYFLASEKERDLFKLILKKEDELGDRSIMFTVQCEDEPKSSDKTHTCPPCPAPPVAGPSVFLFPPKPKDTLMISRTPEVTCVVVDVKHEDPEVKFNWYVDGVEVHNAKTKPREEEYNSTYRVVSVLTVLHQDWLNGKEYKCKVSNKALPAPIEKTISKAKGQPREPQVYTLPPSREEMTKNQVSLTCDVSGFYPSDIAVEWESDGQPENNYKTTPPVLDSDGSFFLYSKLTVDKSRWEQGDVFSCSVMHEALHNHYTQKSLSLSPG

SEQ ID NO: 983 - protein, 230 aa, synthetic construct; identical to SEQ ID NO: 260
  source 1..230: note = XENP41759 Chain 2 - empty_Fc(216)_IgG1_PVA_/S267K/S364K/E357Q/K447del

SEQ ID NO: 984 - protein, 387 aa, synthetic construct
  source 1..387: note = XENP41760 Chain 1 - human_IL18_4CS_S10C_K53D_N111T_N155C_Fc(216)_IgG1_pI(-)_Iso steric_A_C220S/PVA_/S267K/L368D/K370S/K447del
YFGKLESKLCVIRNLNDQVLFIDQGNRPLFEDMTDSDSRDNAPRTIFIISMYDDSQPRGMAVTISVKSEKISTLSSENKIISFKEMNPPDNIKDTKSDIIFFQRSVPGHDTKMQFESSSYEGYFLASEKERDLFKLILKKEDELGDRSIMFTVQCEDEPKSSDKTHTCPPCPAPPVAGPSVFLFPPKPKDTLMISRTPEVTCVVVDVKHEDPEVKFNWYVDGVEVHNAKTKPREEEYNSTYRVVSVLTVLHQDWLNGKEYKCKVSNKALPAPIEKTISKAKGQPREPQVYTLPPSREEMTKNQVSLTCDVSGFYPSDIAVEWESDGQPENNYKTTPPVLDSDGSFFLYSKLTVDKSRWEQGDVFSCSVMHEALHNHYTQKSLSLSPG

SEQ ID NO: 985 - protein, 230 aa, synthetic construct; identical to SEQ ID NO: 260
  source 1..230: note = XENP41760 Chain 2 - empty_Fc(216)_IgG1_PVA_/S267K/S364K/E357Q/K447del

SEQ ID NO: 986 - protein, 387 aa, synthetic construct
  source 1..387: note = XENP41761 Chain 1 - human_IL18_4CS_S10C_K53D_S55T_N155C_Fc(216)_IgG1_pI(-)_Isos teric_A_C220S/PVA_/S267K/L368D/K370S/K447del
YFGKLESKLCVIRNLNDQVLFIDQGNRPLFEDMTDSDSRDNAPRTIFIISMYDDTQPRGMAVTISVKSEKISTLSSENKIISFKEMNPPDNIKDTKSDIIFFQRSVPGHDNKMQFESSSYEGYFLASEKERDLFKLILKKEDELGDRSIMFTVQCEDEPKSSDKTHTCPPCPAPPVAGPSVFLFPPKPKDTLMISRTPEVTCVVVDVKHEDPEVKFNWYVDGVEVHNAKTKPREEEYNSTYRVVSVLTVLHQDWLNGKEYKCKVSNKALPAPIEKTISKAKGQPREPQVYTLPPSREEMTKNQVSLTCDVSGFYPSDIAVEWESDGQPENNYKTTPPVLDSDGSFFLYSKLTVDKSRWEQGDVFSCSVMHEALHNHYTQKSLSLSPG

SEQ ID NO: 987 - protein, 230 aa, synthetic construct; identical to SEQ ID NO: 260
  source 1..230: note = XENP41761 Chain 2 - empty_Fc(216)_IgG1_PVA_/S267K/S364K/E357Q/K447del

SEQ ID NO: 988 - protein, 387 aa, synthetic construct
  source 1..387: note = XENP41762 Chain 1 - human_IL18_4CS_S10C_K53D_N155C_Fc(216)_IgG1_pI(-)_Isosteric _A_C220S/PVA_/S267K/L368D/K370S/K447del
YFGKLESKLCVIRNLNDQVLFIDQGNRPLFEDMTDSDSRDNAPRTIFIISMYDDSQPRGMAVTISVKSEKISTLSSENKIISFKEMNPPDNIKDTKSDIIFFQRSVPGHDNKMQFESSSYEGYFLASEKERDLFKLILKKEDELGDRSIMFTVQCEDEPKSSDKTHTCPPCPAPPVAGPSVFLFPPKPKDTLMISRTPEVTCVVVDVKHEDPEVKFNWYVDGVEVHNAKTKPREEEYNSTYRVVSVLTVLHQDWLNGKEYKCKVSNKALPAPIEKTISKAKGQPREPQVYTLPPSREEMTKNQVSLTCDVSGFYPSDIAVEWESDGQPENNYKTTPPVLDSDGSFFLYSKLTVDKSRWEQGDVFSCSVMHEALHNHYTQKSLSLSPG

SEQ ID NO: 989 - protein, 230 aa, synthetic construct; identical to SEQ ID NO: 260
  source 1..230: note = XENP41762 Chain 2 - empty_Fc(216)_IgG1_PVA_/S267K/S364K/E357Q/K447del

SEQ ID NO: 990 - protein, 387 aa, synthetic construct
  source 1..387: note = XENP41763 Chain 1 - human_IL18_4CS_S10C_D37N_K53D_N155C_Fc(216)_IgG1_pI(-)_Isos teric_A_C220S/PVA_/S267K/L368D/K370S/K447del
YFGKLESKLCVIRNLNDQVLFIDQGNRPLFEDMTDSNSRDNAPRTIFIISMYDDSQPRGMAVTISVKSEKISTLSSENKIISFKEMNPPDNIKDTKSDIIFFQRSVPGHDNKMQFESSSYEGYFLASEKERDLFKLILKKEDELGDRSIMFTVQCEDEPKSSDKTHTCPPCPAPPVAGPSVFLFPPKPKDTLMISRTPEVTCVVVDVKHEDPEVKFNWYVDGVEVHNAKTKPREEEYNSTYRVVSVLTVLHQDWLNGKEYKCKVSNKALPAPIEKTISKAKGQPREPQVYTLPPSREEMTKNQVSLTCDVSGFYPSDIAVEWESDGQPENNYKTTPPVLDSDGSFFLYSKLTVDKSRWEQGDVFSCSVMHEALHNHYTQKSLSLSPG

SEQ ID NO: 991 - protein, 230 aa, synthetic construct; identical to SEQ ID NO: 260
  source 1..230: note = XENP41763 Chain 2 - empty_Fc(216)_IgG1_PVA_/S267K/S364K/E357Q/K447del

SEQ ID NO: 992 - protein, 387 aa, synthetic construct
  source 1..387: note = XENP41764 Chain 1 - human_IL18_4CS_S10C_D35N_K53D_N155C_Fc(216)_IgG1_pI(-)_Isos teric_A_C220S/PVA_/S267K/L368D/K370S/K447del
YFGKLESKLCVIRNLNDQVLFIDQGNRPLFEDMTNSDSRDNAPRTIFIISMYDDSQPRGMAVTISVKSEKISTLSSENKIISFKEMNPPDNIKDTKSDIIFFQRSVPGHDNKMQFESSSYEGYFLASEKERDLFKLILKKEDELGDRSIMFTVQCEDEPKSSDKTHTCPPCPAPPVAGPSVFLFPPKPKDTLMISRTPEVTCVVVDVKHEDPEVKFNWYVDGVEVHNAKTKPREEEYNSTYRVVSVLTVLHQDWLNGKEYKCKVSNKALPAPIEKTISKAKGQPREPQVYTLPPSREEMTKNQVSLTCDVSGFYPSDIAVEWESDGQPENNYKTTPPVLDSDGSFFLYSKLTVDKSRWEQGDVFSCSVMHEALHNHYTQKSLSLSPG

SEQ ID NO: 993 - protein, 230 aa, synthetic construct; identical to SEQ ID NO: 260
  source 1..230: note = XENP41764 Chain 2 - empty_Fc(216)_IgG1_PVA_/S267K/S364K/E357Q/K447del

SEQ ID NO: 994 - protein, 387 aa, synthetic construct
  source 1..387: note = XENP41765 Chain 1 - human_IL18_4CS_S10C_E31Q_K53D_N155C_Fc(216)_IgG1_pI(-)_Isos teric_A_C220S/PVA_/S267K/L368D/K370S/K447del
YFGKLESKLCVIRNLNDQVLFIDQGNRPLFQDMTDSDSRDNAPRTIFIISMYDDSQPRGMAVTISVKSEKISTLSSENKIISFKEMNPPDNIKDTKSDIIFFQRSVPGHDNKMQFESSSYEGYFLASEKERDLFKLILKKEDELGDRSIMFTVQCEDEPKSSDKTHTCPPCPAPPVAGPSVFLFPPKPKDTLMISRTPEVTCVVVDVKHEDPEVKFNWYVDGVEVHNAKTKPREEEYNSTYRVVSVLTVLHQDWLNGKEYKCKVSNKALPAPIEKTISKAKGQPREPQVYTLPPSREEMTKNQVSLTCDVSGFYPSDIAVEWESDGQPENNYKTTPPVLDSDGSFFLYSKLTVDKSRWEQGDVFSCSVMHEALHNHYTQKSLSLSPG

SEQ ID NO: 995 - protein, 230 aa, synthetic construct; identical to SEQ ID NO: 260
  source 1..230: note = XENP41765 Chain 2 - empty_Fc(216)_IgG1_PVA_/S267K/S364K/E357Q/K447del

SEQ ID NO: 996 - protein, 387 aa, synthetic construct
  source 1..387: note = XENP41766 Chain 1 - human_IL18_4CS_S10C_N41Q_K53D_N155C_Fc(216)_IgG1_pI(-)_Isos teric_A_C220S/PVA_/S267K/L368D/K370S/K447del
YFGKLESKLCVIRNLNDQVLFIDQGNRPLFEDMTDSDSRDQAPRTIFIISMYDDSQPRGMAVTISVKSEKISTLSSENKIISFKEMNPPDNIKDTKSDIIFFQRSVPGHDNKMQFESSSYEGYFLASEKERDLFKLILKKEDELGDRSIMFTVQCEDEPKSSDKTHTCPPCPAPPVAGPSVFLFPPKPKDTLMISRTPEVTCVVVDVKHEDPEVKFNWYVDGVEVHNAKTKPREEEYNSTYRVVSVLTVLHQDWLNGKEYKCKVSNKALPAPIEKTISKAKGQPREPQVYTLPPSREEMTKNQVSLTCDVSGFYPSDIAVEWESDGQPENNYKTTPPVLDSDGSFFLYSKLTVDKSRWEQGDVFSCSVMHEALHNHYTQKSLSLSPG

SEQ ID NO: 997 - protein, 230 aa, synthetic construct; identical to SEQ ID NO: 260
  source 1..230: note = XENP41766 Chain 2 - empty_Fc(216)_IgG1_PVA_/S267K/S364K/E357Q/K447del

SEQ ID NO: 998 - protein, 387 aa, synthetic construct
  source 1..387: note = XENP41767 Chain 1 - human_IL18_4CS_S10C_D35N_D37N_N155C_Fc(216)_IgG1_pI(-)_Isos teric_A_C220S/PVA_/S267K/L368D/K370S/K447del
YFGKLESKLCVIRNLNDQVLFIDQGNRPLFEDMTNSNSRDNAPRTIFIISMYKDSQPRGMAVTISVKSEKISTLSSENKIISFKEMNPPDNIKDTKSDIIFFQRSVPGHDNKMQFESSSYEGYFLASEKERDLFKLILKKEDELGDRSIMFTVQCEDEPKSSDKTHTCPPCPAPPVAGPSVFLFPPKPKDTLMISRTPEVTCVVVDVKHEDPEVKFNWYVDGVEVHNAKTKPREEEYNSTYRVVSVLTVLHQDWLNGKEYKCKVSNKALPAPIEKTISKAKGQPREPQVYTLPPSREEMTKNQVSLTCDVSGFYPSDIAVEWESDGQPENNYKTTPPVLDSDGSFFLYSKLTVDKSRWEQGDVFSCSVMHEALHNHYTQKSLSLSPG

SEQ ID NO: 999 - protein, 230 aa, synthetic construct; identical to SEQ ID NO: 260
  source 1..230: note = XENP41767 Chain 2 - empty_Fc(216)_IgG1_PVA_/S267K/S364K/E357Q/K447del

SEQ ID NO: 1000 - protein, 387 aa, synthetic construct
  source 1..387: note = XENP41768 Chain 1 - human_IL18_4CS_S10C_E31Q_D37N_N155C_Fc(216)_IgG1_pI(-)_Isos teric_A_C220S/PVA_/S267K/L368D/K370S/K447del
YFGKLESKLCVIRNLNDQVLFIDQGNRPLFQDMTDSNSRDNAPRTIFIISMYKDSQPRGMAVTISVKSEKISTLSSENKIISFKEMNPPDNIKDTKSDIIFFQRSVPGHDNKMQFESSSYEGYFLASEKERDLFKLILKKEDELGDRSIMFTVQCEDEPKSSDKTHTCPPCPAPPVAGPSVFLFPPKPKDTLMISRTPEVTCVVVDVKHEDPEVKFNWYVDGVEVHNAKTKPREEEYNSTYRVVSVLTVLHQDWLNGKEYKCKVSNKALPAPIEKTISKAKGQPREPQVYTLPPSREEMTKNQVSLTCDVSGFYPSDIAVEWESDGQPENNYKTTPPVLDSDGSFFLYSKLTVDKSRWEQGDVFSCSVMHEALHNHYTQKSLSLSPG

SEQ ID NO: 1001 - protein, 230 aa, synthetic construct; identical to SEQ ID NO: 260
  source 1..230: note = XENP41768 Chain 2 - empty_Fc(216)_IgG1_PVA_/S267K/S364K/E357Q/K447del

SEQ ID NO: 1002 - protein, 387 aa, synthetic construct
  source 1..387: note = XENP41769 Chain 1 - human_IL18_4CS_S10C_E31Q_N41Q_N155C_Fc(216)_IgG1_pI(-)_Isos teric_A_C220S/PVA_/S267K/L368D/K370S/K447del
YFGKLESKLCVIRNLNDQVLFIDQGNRPLFQDMTDSDSRDQAPRTIFIISMYKDSQPRGMAVTISVKSEKISTLSSENKIISFKEMNPPDNIKDTKSDIIFFQRSVPGHDNKMQFESSSYEGYFLASEKERDLFKLILKKEDELGDRSIMFTVQCEDEPKSSDKTHTCPPCPAPPVAGPSVFLFPPKPKDTLMISRTPEVTCVVVDVKHEDPEVKFNWYVDGVEVHNAKTKPREEEYNSTYRVVSVLTVLHQDWLNGKEYKCKVSNKALPAPIEKTISKAKGQPREPQVYTLPPSREEMTKNQVSLTCDVSGFYPSDIAVEWESDGQPENNYKTTPPVLDSDGSFFLYSKLTVDKSRWEQGDVFSCSVMHEALHNHYTQKSLSLSPG

SEQ ID NO: 1003 - protein, 230 aa, synthetic construct; identical to SEQ ID NO: 260
  source 1..230: note = XENP41769 Chain 2 - empty_Fc(216)_IgG1_PVA_/S267K/S364K/E357Q/K447del

SEQ ID NO: 1004 - protein, 387 aa, synthetic construct
  source 1..387: note = XENP41770 Chain 1 - human_IL18_4CS_S10C_E31Q_D35N_N155C_Fc(216)_IgG1_pI(-)_Isos teric_A_C220S/PVA_/S267K/L368D/K370S/K447del
YFGKLESKLCVIRNLNDQVLFIDQGNRPLFQDMTNSDSRDNAPRTIFIISMYKDSQPRGMAVTISVKSEKISTLSSENKIISFKEMNPPDNIKDTKSDIIFFQRSVPGHDNKMQFESSSYEGYFLASEKERDLFKLILKKEDELGDRSIMFTVQCEDEPKSSDKTHTCPPCPAPPVAGPSVFLFPPKPKDTLMISRTPEVTCVVVDVKHEDPEVKFNWYVDGVEVHNAKTKPREEEYNSTYRVVSVLTVLHQDWLNGKEYKCKVSNKALPAPIEKTISKAKGQPREPQVYTLPPSREEMTKNQVSLTCDVSGFYPSDIAVEWESDGQPENNYKTTPPVLDSDGSFFLYSKLTVDKSRWEQGDVFSCSVMHEALHNHYTQKSLSLSPG

SEQ ID NO: 1005 - protein, 230 aa, synthetic construct; identical to SEQ ID NO: 260
  source 1..230: note = XENP41770 Chain 2 - empty_Fc(216)_IgG1_PVA_/S267K/S364K/E357Q/K447del

SEQ ID NO: 1006 - protein, 387 aa, synthetic construct
  source 1..387: note = XENP41974 Chain 1 - human_IL18_4CS_S10C_N155C_Fc(216)_IgG1_pI(-)_Isosteric_A_C2 20S/PVA_/S267K/L368D/K370S/M428L/N434S/K447del
YFGKLESKLCVIRNLNDQVLFIDQGNRPLFEDMTDSDSRDNAPRTIFIISMYKDSQPRGMAVTISVKSEKISTLSSENKIISFKEMNPPDNIKDTKSDIIFFQRSVPGHDNKMQFESSSYEGYFLASEKERDLFKLILKKEDELGDRSIMFTVQCEDEPKSSDKTHTCPPCPAPPVAGPSVFLFPPKPKDTLMISRTPEVTCVVVDVKHEDPEVKFNWYVDGVEVHNAKTKPREEEYNSTYRVVSVLTVLHQDWLNGKEYKCKVSNKALPAPIEKTISKAKGQPREPQVYTLPPSREEMTKNQVSLTCDVSGFYPSDIAVEWESDGQPENNYKTTPPVLDSDGSFFLYSKLTVDKSRWEQGDVFSCSVLHEALHSHYTQKSLSLSPG

SEQ ID NO: 1007 - protein, 230 aa, synthetic construct
  source 1..230: note = XENP41974 Chain 2 - empty_Fc(216)_IgG1_PVA_/S267K/S364K/E357Q/M428L/N434S/K447d el
EPKSSDKTHTCPPCPAPPVAGPSVFLFPPKPKDTLMISRTPEVTCVVVDVKHEDPEVKFNWYVDGVEVHNAKTKPREEQYNSTYRVVSVLTVLHQDWLNGKEYKCKVSNKALPAPIEKTISKAKGQPREPQVYTLPPSREQMTKNQVKLTCLVKGFYPSDIAVEWESNGQPENNYKTTPPVLDSDGSFFLYSKLTVDKSRWQQGNVFSCSVLHEALHSHYTQKSLSLSPG

SEQ ID NO: 1008 - protein, 387 aa, synthetic construct
  source 1..387: note = XENP41975 Chain 1 - human_IL18_4CS_S10C_K53D_N155C_Fc(216)_IgG1_pI(-)_Isosteric _A_C220S/PVA_/S267K/L368D/K370S/M428L/N434S/K447del
YFGKLESKLCVIRNLNDQVLFIDQGNRPLFEDMTDSDSRDNAPRTIFIISMYDDSQPRGMAVTISVKSEKISTLSSENKIISFKEMNPPDNIKDTKSDIIFFQRSVPGHDNKMQFESSSYEGYFLASEKERDLFKLILKKEDELGDRSIMFTVQCEDEPKSSDKTHTCPPCPAPPVAGPSVFLFPPKPKDTLMISRTPEVTCVVVDVKHEDPEVKFNWYVDGVEVHNAKTKPREEEYNSTYRVVSVLTVLHQDWLNGKEYKCKVSNKALPAPIEKTISKAKGQPREPQVYTLPPSREEMTKNQVSLTCDVSGFYPSDIAVEWESDGQPENNYKTTPPVLDSDGSFFLYSKLTVDKSRWEQGDVFSCSVLHEALHSHYTQKSLSLSPG

SEQ ID NO: 1009 - protein, 230 aa, synthetic construct; identical to SEQ ID NO: 1007
  source 1..230: note = XENP41975 Chain 2 - empty_Fc(216)_IgG1_PVA_/S267K/S364K/E357Q/M428L/N434S/K447d el

SEQ ID NO: 1010 - protein, 387 aa, synthetic construct
  source 1..387: note = XENP42006 Chain 1 - human_IL18_4CS_E6Q_S10C_K53D_N111T_N155C_Fc(216)_IgG1_pI(-) _Isosteric_A_C220S/PVA_/S267K/L368D/K370S/K447del
YFGKLQSKLCVIRNLNDQVLFIDQGNRPLFEDMTDSDSRDNAPRTIFIISMYDDSQPRGMAVTISVKSEKISTLSSENKIISFKEMNPPDNIKDTKSDIIFFQRSVPGHDTKMQFESSSYEGYFLASEKERDLFKLILKKEDELGDRSIMFTVQCEDEPKSSDKTHTCPPCPAPPVAGPSVFLFPPKPKDTLMISRTPEVTCVVVDVKHEDPEVKFNWYVDGVEVHNAKTKPREEEYNSTYRVVSVLTVLHQDWLNGKEYKCKVSNKALPAPIEKTISKAKGQPREPQVYTLPPSREEMTKNQVSLTCDVSGFYPSDIAVEWESDGQPENNYKTTPPVLDSDGSFFLYSKLTVDKSRWEQGDVFSCSVMHEALHNHYTQKSLSLSPG

SEQ ID NO: 1011 - protein, 230 aa, synthetic construct; identical to SEQ ID NO: 260
  source 1..230: note = XENP42006 Chain 2 - empty_Fc(216)_IgG1_PVA_/S267K/S364K/E357Q/K447del

SEQ ID NO: 1012 - protein, 387 aa, synthetic construct
  source 1..387: note = XENP42007 Chain 1 - human_IL18_4CS_E6Q_S10C_K53D_N111T_N155C_Fc(216)_IgG1_pI(-) _Isosteric_A_C220S/PVA_/S267K/L368D/K370S/M428L/N434S/K447d el
YFGKLQSKLCVIRNLNDQVLFIDQGNRPLFEDMTDSDSRDNAPRTIFIISMYDDSQPRGMAVTISVKSEKISTLSSENKIISFKEMNPPDNIKDTKSDIIFFQRSVPGHDTKMQFESSSYEGYFLASEKERDLFKLILKKEDELGDRSIMFTVQCEDEPKSSDKTHTCPPCPAPPVAGPSVFLFPPKPKDTLMISRTPEVTCVVVDVKHEDPEVKFNWYVDGVEVHNAKTKPREEEYNSTYRVVSVLTVLHQDWLNGKEYKCKVSNKALPAPIEKTISKAKGQPREPQVYTLPPSREEMTKNQVSLTCDVSGFYPSDIAVEWESDGQPENNYKTTPPVLDSDGSFFLYSKLTVDKSRWEQGDVFSCSVLHEALHSHYTQKSLSLSPG

SEQ ID NO: 1013 - protein, 230 aa, synthetic construct; identical to SEQ ID NO: 1007
  source 1..230: note = XENP42007 Chain 2 - empty_Fc(216)_IgG1_PVA_/S267K/S364K/E357Q/M428L/N434S/K447d el

SEQ ID NO: 1014 - protein, 387 aa, synthetic construct
  source 1..387: note = XENP42008 Chain 1 - human_IL18_4CS_S10C_K53D_N111T_N155C_Fc(216)_IgG1_pI(-)_Iso steric_A_C220S/PVA_/S267K/L368D/K370S/M428L/N434S/K447del
YFGKLESKLCVIRNLNDQVLFIDQGNRPLFEDMTDSDSRDNAPRTIFIISMYDDSQPRGMAVTISVKSEKISTLSSENKIISFKEMNPPDNIKDTKSDIIFFQRSVPGHDTKMQFESSSYEGYFLASEKERDLFKLILKKEDELGDRSIMFTVQCEDEPKSSDKTHTCPPCPAPPVAGPSVFLFPPKPKDTLMISRTPEVTCVVVDVKHEDPEVKFNWYVDGVEVHNAKTKPREEEYNSTYRVVSVLTVLHQDWLNGKEYKCKVSNKALPAPIEKTISKAKGQPREPQVYTLPPSREEMTKNQVSLTCDVSGFYPSDIAVEWESDGQPENNYKTTPPVLDSDGSFFLYSKLTVDKSRWEQGDVFSCSVLHEALHSHYTQKSLSLSPG

SEQ ID NO: 1015 - protein, 230 aa, synthetic construct; identical to SEQ ID NO: 1007
  source 1..230: note = XENP42008 Chain 2 - empty_Fc(216)_IgG1_PVA_/S267K/S364K/E357Q/M428L/N434S/K447d el

SEQ ID NO: 1016 - protein, 387 aa, synthetic construct
  source 1..387: note = XENP42009 Chain 1 - human_IL18_4CS_S10C_K53D_S55T_N155C_Fc(216)_IgG1_pI(-)_Isos teric_A_C220S/PVA_/S267K/L368D/K370S/M428L/N434S/K447del
YFGKLESKLCVIRNLNDQVLFIDQGNRPLFEDMTDSDSRDNAPRTIFIISMYDDTQPRGMAVTISVKSEKISTLSSENKIISFKEMNPPDNIKDTKSDIIFFQRSVPGHDNKMQFESSSYEGYFLASEKERDLFKLILKKEDELGDRSIMFTVQCEDEPKSSDKTHTCPPCPAPPVAGPSVFLFPPKPKDTLMISRTPEVTCVVVDVKHEDPEVKFNWYVDGVEVHNAKTKPREEEYNSTYRVVSVLTVLHQDWLNGKEYKCKVSNKALPAPIEKTISKAKGQPREPQVYTLPPSREEMTKNQVSLTCDVSGFYPSDIAVEWESDGQPENNYKTTPPVLDSDGSFFLYSKLTVDKSRWEQGDVFSCSVLHEALHSHYTQKSLSLSPG

SEQ ID NO: 1017 - protein, 230 aa, synthetic construct; identical to SEQ ID NO: 1007
  source 1..230: note = XENP42009 Chain 2 - empty_Fc(216)_IgG1_PVA_/S267K/S364K/E357Q/M428L/N434S/K447d el

SEQ ID NO: 1018 - protein, 387 aa, synthetic construct
  source 1..387: note = XENP42010 Chain 1 - human_IL18_4CS_S10C_D37N_K53D_N155C_Fc(216)_IgG1_pI(-)_Isos teric_A_C220S/PVA_/S267K/L368D/K370S/M428L/N434S/K447del
YFGKLESKLCVIRNLNDQVLFIDQGNRPLFEDMTDSNSRDNAPRTIFIISMYDDSQPRGMAVTISVKSEKISTLSSENKIISFKEMNPPDNIKDTKSDIIFFQRSVPGHDNKMQFESSSYEGYFLASEKERDLFKLILKKEDELGDRSIMFTVQCEDEPKSSDKTHTCPPCPAPPVAGPSVFLFPPKPKDTLMISRTPEVTCVVVDVKHEDPEVKFNWYVDGVEVHNAKTKPREEEYNSTYRVVSVLTVLHQDWLNGKEYKCKVSNKALPAPIEKTISKAKGQPREPQVYTLPPSREEMTKNQVSLTCDVSGFYPSDIAVEWESDGQPENNYKTTPPVLDSDGSFFLYSKLTVDKSRWEQGDVFSCSVLHEALHSHYTQKSLSLSPG

SEQ ID NO: 1019 - protein, 230 aa, synthetic construct; identical to SEQ ID NO: 1007
  source 1..230: note = XENP42010 Chain 2 - empty_Fc(216)_IgG1_PVA_/S267K/S364K/E357Q/M428L/N434S/K447d el

SEQ ID NO: 1020 - protein, 387 aa, synthetic construct
  source 1..387: note = XENP42011 Chain 1 - human_IL18_4CS_S10C_E31Q_D35N_N155C_Fc(216)_IgG1_pI(-)_Isos teric_A_C220S/PVA_/S267K/L368D/K370S/M428L/N434S/K447del
YFGKLESKLCVIRNLNDQVLFIDQGNRPLFQDMTNSDSRDNAPRTIFIISMYKDSQPRGMAVTISVKSEKISTLSSENKIISFKEMNPPDNIKDTKSDIIFFQRSVPGHDNKMQFESSSYEGYFLASEKERDLFKLILKKEDELGDRSIMFTVQCEDEPKSSDKTHTCPPCPAPPVAGPSVFLFPPKPKDTLMISRTPEVTCVVVDVKHEDPEVKFNWYVDGVEVHNAKTKPREEEYNSTYRVVSVLTVLHQDWLNGKEYKCKVSNKALPAPIEKTISKAKGQPREPQVYTLPPSREEMTKNQVSLTCDVSGFYPSDIAVEWESDGQPENNYKTTPPVLDSDGSFFLYSKLTVDKSRWEQGDVFSCSVLHEALHSHYTQKSLSLSPG

SEQ ID NO: 1021 - protein, 230 aa, synthetic construct; identical to SEQ ID NO: 1007
  source 1..230: note = XENP42011 Chain 2 - empty_Fc(216)_IgG1_PVA_/S267K/S364K/E357Q/M428L/N434S/K447d el

SEQ ID NO: 1022 - protein, 387 aa, synthetic construct
  source 1..387: note = XENP42012 Chain 1 - human_IL18_4CS_E6Q_S10C_K53D_N155C_Fc(216)_IgG1_pI(-)_Isost eric_A_C220S/PVA_/S267K/L368D/K370S/M428L/N434S/K447del
YFGKLQSKLCVIRNLNDQVLFIDQGNRPLFEDMTDSDSRDNAPRTIFIISMYDDSQPRGMAVTISVKSEKISTLSSENKIISFKEMNPPDNIKDTKSDIIFFQRSVPGHDNKMQFESSSYEGYFLASEKERDLFKLILKKEDELGDRSIMFTVQCEDEPKSSDKTHTCPPCPAPPVAGPSVFLFPPKPKDTLMISRTPEVTCVVVDVKHEDPEVKFNWYVDGVEVHNAKTKPREEEYNSTYRVVSVLTVLHQDWLNGKEYKCKVSNKALPAPIEKTISKAKGQPREPQVYTLPPSREEMTKNQVSLTCDVSGFYPSDIAVEWESDGQPENNYKTTPPVLDSDGSFFLYSKLTVDKSRWEQGDVFSCSVLHEALHSHYTQKSLSLSPG

SEQ ID NO: 1023 - protein, 230 aa, synthetic construct; identical to SEQ ID NO: 1007
  source 1..230: note = XENP42012 Chain 2 - empty_Fc(216)_IgG1_PVA_/S267K/S364K/E357Q/M428L/N434S/K447d el

SEQ ID NO: 1024 - protein, 388 aa, synthetic construct
  source 1..388: note = XENP42141 Chain 1 - human_IL18_4CS_S10C_N155C_Fc(216)_IgG1_pI(-)_Isosteric_A_C2 20S/PVA_/S267K/L368D/K370S/M428L/N434S
YFGKLESKLCVIRNLNDQVLFIDQGNRPLFEDMTDSDSRDNAPRTIFIISMYKDSQPRGMAVTISVKSEKISTLSSENKIISFKEMNPPDNIKDTKSDIIFFQRSVPGHDNKMQFESSSYEGYFLASEKERDLFKLILKKEDELGDRSIMFTVQCEDEPKSSDKTHTCPPCPAPPVAGPSVFLFPPKPKDTLMISRTPEVTCVVVDVKHEDPEVKFNWYVDGVEVHNAKTKPREEEYNSTYRVVSVLTVLHQDWLNGKEYKCKVSNKALPAPIEKTISKAKGQPREPQVYTLPPSREEMTKNQVSLTCDVSGFYPSDIAVEWESDGQPENNYKTTPPVLDSDGSFFLYSKLTVDKSRWEQGDVFSCSVLHEALHSHYTQKSLSLSPGK

SEQ ID NO: 1025 - protein, 231 aa, synthetic construct
  source 1..231: note = XENP42141 Chain 2 - empty_Fc(216)_IgG1_PVA_/S267K/S364K/E357Q/M428L/N434S
EPKSSDKTHTCPPCPAPPVAGPSVFLFPPKPKDTLMISRTPEVTCVVVDVKHEDPEVKFNWYVDGVEVHNAKTKPREEQYNSTYRVVSVLTVLHQDWLNGKEYKCKVSNKALPAPIEKTISKAKGQPREPQVYTLPPSREQMTKNQVKLTCLVKGFYPSDIAVEWESNGQPENNYKTTPPVLDSDGSFFLYSKLTVDKSRWQQGNVFSCSVLHEALHSHYTQKSLSLSPGK

SEQ ID NO: 1026 - protein, 388 aa, synthetic construct
  source 1..388: note = XENP42142 Chain 1 - human_IL18_4CS_S10C_E31Q_D35N_N155C_Fc(216)_IgG1_pI(-)_Isos teric_A_C220S/PVA_/S267K/L368D/K370S/M428L/N434S
YFGKLESKLCVIRNLNDQVLFIDQGNRPLFQDMTNSDSRDNAPRTIFIISMYKDSQPRGMAVTISVKSEKISTLSSENKIISFKEMNPPDNIKDTKSDIIFFQRSVPGHDNKMQFESSSYEGYFLASEKERDLFKLILKKEDELGDRSIMFTVQCEDEPKSSDKTHTCPPCPAPPVAGPSVFLFPPKPKDTLMISRTPEVTCVVVDVKHEDPEVKFNWYVDGVEVHNAKTKPREEEYNSTYRVVSVLTVLHQDWLNGKEYKCKVSNKALPAPIEKTISKAKGQPREPQVYTLPPSREEMTKNQVSLTCDVSGFYPSDIAVEWESDGQPENNYKTTPPVLDSDGSFFLYSKLTVDKSRWEQGDVFSCSVLHEALHSHYTQKSLSLSPGK

SEQ ID NO: 1027 - protein, 231 aa, synthetic construct; identical to SEQ ID NO: 1025
  source 1..231: note = XENP42142 Chain 2 - empty_Fc(216)_IgG1_PVA_/S267K/S364K/E357Q/M428L/N434S

SEQ ID NO: 1028 - protein, 388 aa, synthetic construct
  source 1..388: note = XENP42143 Chain 1 - human_IL18_4CS_E6Q_S10C_K53D_N111T_N155C_Fc(216)_IgG1_pI(-) _Isosteric_A_C220S/PVA_/S267K/L368D/K370S/M428L/N434S
YFGKLQSKLCVIRNLNDQVLFIDQGNRPLFEDMTDSDSRDNAPRTIFIISMYDDSQPRGMAVTISVKSEKISTLSSENKIISFKEMNPPDNIKDTKSDIIFFQRSVPGHDTKMQFESSSYEGYFLASEKERDLFKLILKKEDELGDRSIMFTVQCEDEPKSSDKTHTCPPCPAPPVAGPSVFLFPPKPKDTLMISRTPEVTCVVVDVKHEDPEVKFNWYVDGVEVHNAKTKPREEEYNSTYRVVSVLTVLHQDWLNGKEYKCKVSNKALPAPIEKTISKAKGQPREPQVYTLPPSREEMTKNQVSLTCDVSGFYPSDIAVEWESDGQPENNYKTTPPVLDSDGSFFLYSKLTVDKSRWEQGDVFSCSVLHEALHSHYTQKSLSLSPGK

SEQ ID NO: 1029 - protein, 231 aa, synthetic construct; identical to SEQ ID NO: 1025
  source 1..231: note = XENP42143 Chain 2 - empty_Fc(216)_IgG1_PVA_/S267K/S364K/E357Q/M428L/N434S

SEQ ID NO: 1030 - protein, 388 aa, synthetic construct
  source 1..388: note = XENP42144 Chain 1 - human_IL18_4CS_E6Q_S10C_K53D_N155C_Fc(216)_IgG1_pI(-)_Isost eric_A_C220S/PVA_/S267K/L368D/K370S/M428L/N434S
YFGKLQSKLCVIRNLNDQVLFIDQGNRPLFEDMTDSDSRDNAPRTIFIISMYDDSQPRGMAVTISVKSEKISTLSSENKIISFKEMNPPDNIKDTKSDIIFFQRSVPGHDNKMQFESSSYEGYFLASEKERDLFKLILKKEDELGDRSIMFTVQCEDEPKSSDKTHTCPPCPAPPVAGPSVFLFPPKPKDTLMISRTPEVTCVVVDVKHEDPEVKFNWYVDGVEVHNAKTKPREEEYNSTYRVVSVLTVLHQDWLNGKEYKCKVSNKALPAPIEKTISKAKGQPREPQVYTLPPSREEMTKNQVSLTCDVSGFYPSDIAVEWESDGQPENNYKTTPPVLDSDGSFFLYSKLTVDKSRWEQGDVFSCSVLHEALHSHYTQKSLSLSPGK

SEQ ID NO: 1031 - protein, 231 aa, synthetic construct; identical to SEQ ID NO: 1025
  source 1..231: note = XENP42144 Chain 2 - empty_Fc(216)_IgG1_PVA_/S267K/S364K/E357Q/M428L/N434S

SEQ ID NO: 1032 - protein, 388 aa, synthetic construct
  source 1..388: note = XENP42145 Chain 1 - human_IL18_4CS_S10C_K53D_N155C_Fc(216)_IgG1_pI(-)_Isosteric _A_C220S/PVA_/S267K/L368D/K370S/M428L/N434S
YFGKLESKLCVIRNLNDQVLFIDQGNRPLFEDMTDSDSRDNAPRTIFIISMYDDSQPRGMAVTISVKSEKISTLSSENKIISFKEMNPPDNIKDTKSDIIFFQRSVPGHDNKMQFESSSYEGYFLASEKERDLFKLILKKEDELGDRSIMFTVQCEDEPKSSDKTHTCPPCPAPPVAGPSVFLFPPKPKDTLMISRTPEVTCVVVDVKHEDPEVKFNWYVDGVEVHNAKTKPREEEYNSTYRVVSVLTVLHQDWLNGKEYKCKVSNKALPAPIEKTISKAKGQPREPQVYTLPPSREEMTKNQVSLTCDVSGFYPSDIAVEWESDGQPENNYKTTPPVLDSDGSFFLYSKLTVDKSRWEQGDVFSCSVLHEALHSHYTQKSLSLSPGK

SEQ ID NO: 1033 - protein, 231 aa, synthetic construct; identical to SEQ ID NO: 1025
  source 1..231: note = XENP42145 Chain 2 - empty_Fc(216)_IgG1_PVA_/S267K/S364K/E357Q/M428L/N434S

SEQ ID NO: 1034 - protein, 388 aa, synthetic construct
  source 1..388: note = XENP42146 Chain 1 - human_IL18_4CS_S10C_K53D_S55T_N155C_Fc(216)_IgG1_pI(-)_Isos teric_A_C220S/PVA_/S267K/L368D/K370S/M428L/N434S
YFGKLESKLCVIRNLNDQVLFIDQGNRPLFEDMTDSDSRDNAPRTIFIISMYDDTQPRGMAVTISVKSEKISTLSSENKIISFKEMNPPDNIKDTKSDIIFFQRSVPGHDNKMQFESSSYEGYFLASEKERDLFKLILKKEDELGDRSIMFTVQCEDEPKSSDKTHTCPPCPAPPVAGPSVFLFPPKPKDTLMISRTPEVTCVVVDVKHEDPEVKFNWYVDGVEVHNAKTKPREEEYNSTYRVVSVLTVLHQDWLNGKEYKCKVSNKALPAPIEKTISKAKGQPREPQVYTLPPSREEMTKNQVSLTCDVSGFYPSDIAVEWESDGQPENNYKTTPPVLDSDGSFFLYSKLTVDKSRWEQGDVFSCSVLHEALHSHYTQKSLSLSPGK

SEQ ID NO: 1035 - protein, 231 aa, synthetic construct; identical to SEQ ID NO: 1025
  source 1..231: note = XENP42146 Chain 2 - empty_Fc(216)_IgG1_PVA_/S267K/S364K/E357Q/M428L/N434S

SEQ ID NO: 1036 - protein, 388 aa, synthetic construct
  source 1..388: note = XENP42147 Chain 1 - human_IL18_4CS_S10C_K53D_S55T_D110R_N111T_N155C_Fc(216)_IgG 1_pI(-)_Isosteric_A_C220S/PVA_/S267K/L368D/K370S/M428L/N434 S
YFGKLESKLCVIRNLNDQVLFIDQGNRPLFEDMTDSDSRDNAPRTIFIISMYDDTQPRGMAVTISVKSEKISTLSSENKIISFKEMNPPDNIKDTKSDIIFFQRSVPGHRTKMQFESSSYEGYFLASEKERDLFKLILKKEDELGDRSIMFTVQCEDEPKSSDKTHTCPPCPAPPVAGPSVFLFPPKPKDTLMISRTPEVTCVVVDVKHEDPEVKFNWYVDGVEVHNAKTKPREEEYNSTYRVVSVLTVLHQDWLNGKEYKCKVSNKALPAPIEKTISKAKGQPREPQVYTLPPSREEMTKNQVSLTCDVSGFYPSDIAVEWESDGQPENNYKTTPPVLDSDGSFFLYSKLTVDKSRWEQGDVFSCSVLHEALHSHYTQKSLSLSPGK

SEQ ID NO: 1037 - protein, 231 aa, synthetic construct; identical to SEQ ID NO: 1025
  source 1..231: note = XENP42147 Chain 2 - empty_Fc(216)_IgG1_PVA_/S267K/S364K/E357Q/M428L/N434S

SEQ ID NO: 1038 - protein, 388 aa, synthetic construct
  source 1..388: note = XENP42148 Chain 1 - human_IL18_4CS_S10C_D37N_K53D_N155C_Fc(216)_IgG1_pI(-)_Isos teric_A_C220S/PVA_/S267K/L368D/K370S/M428L/N434S
YFGKLESKLCVIRNLNDQVLFIDQGNRPLFEDMTDSNSRDNAPRTIFIISMYDDSQPRGMAVTISVKSEKISTLSSENKIISFKEMNPPDNIKDTKSDIIFFQRSVPGHDNKMQFESSSYEGYFLASEKERDLFKLILKKEDELGDRSIMFTVQCEDEPKSSDKTHTCPPCPAPPVAGPSVFLFPPKPKDTLMISRTPEVTCVVVDVKHEDPEVKFNWYVDGVEVHNAKTKPREEEYNSTYRVVSVLTVLHQDWLNGKEYKCKVSNKALPAPIEKTISKAKGQPREPQVYTLPPSREEMTKNQVSLTCDVSGFYPSDIAVEWESDGQPENNYKTTPPVLDSDGSFFLYSKLTVDKSRWEQGDVFSCSVLHEALHSHYTQKSLSLSPGK

SEQ ID NO: 1039 - protein, 231 aa, synthetic construct; identical to SEQ ID NO: 1025
  source 1..231: note = XENP42148 Chain 2 - empty_Fc(216)_IgG1_PVA_/S267K/S364K/E357Q/M428L/N434S

SEQ ID NO: 1040 - protein, 387 aa, synthetic construct
  source 1..387: note = XENP40934 Chain 1 - human_IL18_4CS_S10C_D35E_N155C_Fc(216)_IgG1_pI(-)_Isosteric _A_C220S/PVA_/S267K/L368D/K370S/K447del
YFGKLESKLCVIRNLNDQVLFIDQGNRPLFEDMTESDSRDNAPRTIFIISMYKDSQPRGMAVTISVKSEKISTLSSENKIISFKEMNPPDNIKDTKSDIIFFQRSVPGHDNKMQFESSSYEGYFLASEKERDLFKLILKKEDELGDRSIMFTVQCEDEPKSSDKTHTCPPCPAPPVAGPSVFLFPPKPKDTLMISRTPEVTCVVVDVKHEDPEVKFNWYVDGVEVHNAKTKPREEEYNSTYRVVSVLTVLHQDWLNGKEYKCKVSNKALPAPIEKTISKAKGQPREPQVYTLPPSREEMTKNQVSLTCDVSGFYPSDIAVEWESDGQPENNYKTTPPVLDSDGSFFLYSKLTVDKSRWEQGDVFSCSVMHEALHNHYTQKSLSLSPG

SEQ ID NO: 1041 - protein, 444 aa, synthetic construct; identical to SEQ ID NO: 386
  source 1..444: note = XENP40934 Chain 2 - SilentFv_H0_Fc(216)_IgG1_PVA_/S267K/S364K/E357Q/H435R/Y436F /K447del

SEQ ID NO: 1042 - protein, 214 aa, synthetic construct; identical to SEQ ID NO: 295
  source 1..214: note = XENP40934 Chain 3 - SilentFv_L0 Light Chain

SEQ ID NO: 1043 - protein, 387 aa, synthetic construct
  source 1..387: note = XENP40935 Chain 1 - human_IL18_4CS_S10C_S36D_N155C_Fc(216)_IgG1_pI(-)_Isosteric _A_C220S/PVA_/S267K/L368D/K370S/K447del
YFGKLESKLCVIRNLNDQVLFIDQGNRPLFEDMTDDDSRDNAPRTIFIISMYKDSQPRGMAVTISVKSEKISTLSSENKIISFKEMNPPDNIKDTKSDIIFFQRSVPGHDNKMQFESSSYEGYFLASEKERDLFKLILKKEDELGDRSIMFTVQCEDEPKSSDKTHTCPPCPAPPVAGPSVFLFPPKPKDTLMISRTPEVTCVVVDVKHEDPEVKFNWYVDGVEVHNAKTKPREEEYNSTYRVVSVLTVLHQDWLNGKEYKCKVSNKALPAPIEKTISKAKGQPREPQVYTLPPSREEMTKNQVSLTCDVSGFYPSDIAVEWESDGQPENNYKTTPPVLDSDGSFFLYSKLTVDKSRWEQGDVFSCSVMHEALHNHYTQKSLSLSPG

SEQ ID NO: 1044 - protein, 444 aa, synthetic construct; identical to SEQ ID NO: 386
  source 1..444: note = XENP40935 Chain 2 - SilentFv_H0_Fc(216)_IgG1_PVA_/S267K/S364K/E357Q/H435R/Y436F /K447del

SEQ ID NO: 1045 - protein, 214 aa, synthetic construct; identical to SEQ ID NO: 295
  source 1..214: note = XENP40935 Chain 3 - SilentFv_L0 Light Chain

SEQ ID NO: 1046 - protein, 387 aa, synthetic construct
  source 1..387: note = XENP40936 Chain 1 - human_IL18_4CS_S10C_S36N_N155C_Fc(216)_IgG1_pI(-)_Isosteric _A_C220S/PVA_/S267K/L368D/K370S/K447del
YFGKLESKLCVIRNLNDQVLFIDQGNRPLFEDMTDNDSRDNAPRTIFIISMYKDSQPRGMAVTISVKSEKISTLSSENKIISFKEMNPPDNIKDTKSDIIFFQRSVPGHDNKMQFESSSYEGYFLASEKERDLFKLILKKEDELGDRSIMFTVQCEDEPKSSDKTHTCPPCPAPPVAGPSVFLFPPKPKDTLMISRTPEVTCVVVDVKHEDPEVKFNWYVDGVEVHNAKTKPREEEYNSTYRVVSVLTVLHQDWLNGKEYKCKVSNKALPAPIEKTISKAKGQPREPQVYTLPPSREEMTKNQVSLTCDVSGFYPSDIAVEWESDGQPENNYKTTPPVLDSDGSFFLYSKLTVDKSRWEQGDVFSCSVMHEALHNHYTQKSLSLSPG

SEQ ID NO: 1047 - protein, 444 aa, synthetic construct; identical to SEQ ID NO: 386
  source 1..444: note = XENP40936 Chain 2 - SilentFv_H0_Fc(216)_IgG1_PVA_/S267K/S364K/E357Q/H435R/Y436F /K447del

SEQ ID NO: 1048 - protein, 214 aa, synthetic construct; identical to SEQ ID NO: 295
  source 1..214: note = XENP40936 Chain 3 - SilentFv_L0 Light Chain

SEQ ID NO: 1049 - protein, 387 aa, synthetic construct
  source 1..387: note = XENP40937 Chain 1 - human_IL18_4CS_S10C_K53V_N155C_Fc(216)_IgG1_pI(-)_Isosteric _A_C220S/PVA_/S267K/L368D/K370S/K447del
YFGKLESKLCVIRNLNDQVLFIDQGNRPLFEDMTDSDSRDNAPRTIFIISMYVDSQPRGMAVTISVKSEKISTLSSENKIISFKEMNPPDNIKDTKSDIIFFQRSVPGHDNKMQFESSSYEGYFLASEKERDLFKLILKKEDELGDRSIMFTVQCEDEPKSSDKTHTCPPCPAPPVAGPSVFLFPPKPKDTLMISRTPEVTCVVVDVKHEDPEVKFNWYVDGVEVHNAKTKPREEEYNSTYRVVSVLTVLHQDWLNGKEYKCKVSNKALPAPIEKTISKAKGQPREPQVYTLPPSREEMTKNQVSLTCDVSGFYPSDIAVEWESDGQPENNYKTTPPVLDSDGSFFLYSKLTVDKSRWEQGDVFSCSVMHEALHNHYTQKSLSLSPG

SEQ ID NO: 1050 - protein, 444 aa, synthetic construct; identical to SEQ ID NO: 386
  source 1..444: note = XENP40937 Chain 2 - SilentFv_H0_Fc(216)_IgG1_PVA_/S267K/S364K/E357Q/H435R/Y436F /K447del

SEQ ID NO: 1051 - protein, 214 aa, synthetic construct; identical to SEQ ID NO: 295
  source 1..214: note = XENP40937 Chain 3 - SilentFv_L0 Light Chain

SEQ ID NO: 1052 - protein, 387 aa, synthetic construct
  source 1..387: note = XENP40938 Chain 1 - human_IL18_4CS_S10C_K53Y_N155C_Fc(216)_IgG1_pI(-)_Isosteric _A_C220S/PVA_/S267K/L368D/K370S/K447del
YFGKLESKLCVIRNLNDQVLFIDQGNRPLFEDMTDSDSRDNAPRTIFIISMYYDSQPRGMAVTISVKSEKISTLSSENKIISFKEMNPPDNIKDTKSDIIFFQRSVPGHDNKMQFESSSYEGYFLASEKERDLFKLILKKEDELGDRSIMFTVQCEDEPKSSDKTHTCPPCPAPPVAGPSVFLFPPKPKDTLMISRTPEVTCVVVDVKHEDPEVKFNWYVDGVEVHNAKTKPREEEYNSTYRVVSVLTVLHQDWLNGKEYKCKVSNKALPAPIEKTISKAKGQPREPQVYTLPPSREEMTKNQVSLTCDVSGFYPSDIAVEWESDGQPENNYKTTPPVLDSDGSFFLYSKLTVDKSRWEQGDVFSCSVMHEALHNHYTQKSLSLSPG

SEQ ID NO: 1053 - protein, 444 aa, synthetic construct; identical to SEQ ID NO: 386
  source 1..444: note = XENP40938 Chain 2 - SilentFv_H0_Fc(216)_IgG1_PVA_/S267K/S364K/E357Q/H435R/Y436F /K447del

SEQ ID NO: 1054 - protein, 214 aa, synthetic construct; identical to SEQ ID NO: 295
  source 1..214: note = XENP40938 Chain 3 - SilentFv_L0 Light Chain

SEQ ID NO: 1055 - protein, 387 aa, synthetic construct
  source 1..387: note = XENP40939 Chain 1 - human_IL18_4CS_S10C_K53F_N155C_Fc(216)_IgG1_pI(-)_Isosteric _A_C220S/PVA_/S267K/L368D/K370S/K447del
YFGKLESKLCVIRNLNDQVLFIDQGNRPLFEDMTDSDSRDNAPRTIFIISMYFDSQPRGMAVTISVKSEKISTLSSENKIISFKEMNPPDNIKDTKSDIIFFQRSVPGHDNKMQFESSSYEGYFLASEKERDLFKLILKKEDELGDRSIMFTVQCEDEPKSSDKTHTCPPCPAPPVAGPSVFLFPPKPKDTLMISRTPEVTCVVVDVKHEDPEVKFNWYVDGVEVHNAKTKPREEEYNSTYRVVSVLTVLHQDWLNGKEYKCKVSNKALPAPIEKTISKAKGQPREPQVYTLPPSREEMTKNQVSLTCDVSGFYPSDIAVEWESDGQPENNYKTTPPVLDSDGSFFLYSKLTVDKSRWEQGDVFSCSVMHEALHNHYTQKSLSLSPG

SEQ ID NO: 1056 - protein, 444 aa, synthetic construct; identical to SEQ ID NO: 386
  source 1..444: note = XENP40939 Chain 2 - SilentFv_H0_Fc(216)_IgG1_PVA_/S267K/S364K/E357Q/H435R/Y436F /K447del

SEQ ID NO: 1057 - protein, 214 aa, synthetic construct; identical to SEQ ID NO: 295
  source 1..214: note = XENP40939 Chain 3 - SilentFv_L0 Light Chain

SEQ ID NO: 1058 - protein, 387 aa, synthetic construct
  source 1..387: note = XENP40940 Chain 1 - human_IL18_4CS_S10C_M51R_N155C_Fc(216)_IgG1_pI(-)_Isosteric _A_C220S/PVA_/S267K/L368D/K370S/K447del
YFGKLESKLCVIRNLNDQVLFIDQGNRPLFEDMTDSDSRDNAPRTIFIISRYKDSQPRGMAVTISVKSEKISTLSSENKIISFKEMNPPDNIKDTKSDIIFFQRSVPGHDNKMQFESSSYEGYFLASEKERDLFKLILKKEDELGDRSIMFTVQCEDEPKSSDKTHTCPPCPAPPVAGPSVFLFPPKPKDTLMISRTPEVTCVVVDVKHEDPEVKFNWYVDGVEVHNAKTKPREEEYNSTYRVVSVLTVLHQDWLNGKEYKCKVSNKALPAPIEKTISKAKGQPREPQVYTLPPSREEMTKNQVSLTCDVSGFYPSDIAVEWESDGQPENNYKTTPPVLDSDGSFFLYSKLTVDKSRWEQGDVFSCSVMHEALHNHYTQKSLSLSPG

SEQ ID NO: 1059 - protein, 444 aa, synthetic construct; identical to SEQ ID NO: 386
  source 1..444: note = XENP40940 Chain 2 - SilentFv_H0_Fc(216)_IgG1_PVA_/S267K/S364K/E357Q/H435R/Y436F /K447del

SEQ ID NO: 1060 - protein, 214 aa, synthetic construct; identical to SEQ ID NO: 295
  source 1..214: note = XENP40940 Chain 3 - SilentFv_L0 Light Chain

SEQ ID NO: 1061 - protein, 387 aa, synthetic construct
  source 1..387: note = XENP40941 Chain 1 - human_IL18_4CS_S10C_M51L_N155C_Fc(216)_IgG1_pI(-)_Isosteric _A_C220S/PVA_/S267K/L368D/K370S/K447del
YFGKLESKLCVIRNLNDQVLFIDQGNRPLFEDMTDSDSRDNAPRTIFIISLYKDSQPRGMAVTISVKSEKISTLSSENKIISFKEMNPPDNIKDTKSDIIFFQRSVPGHDNKMQFESSSYEGYFLASEKERDLFKLILKKEDELGDRSIMFTVQCEDEPKSSDKTHTCPPCPAPPVAGPSVFLFPPKPKDTLMISRTPEVTCVVVDVKHEDPEVKFNWYVDGVEVHNAKTKPREEEYNSTYRVVSVLTVLHQDWLNGKEYKCKVSNKALPAPIEKTISKAKGQPREPQVYTLPPSREEMTKNQVSLTCDVSGFYPSDIAVEWESDGQPENNYKTTPPVLDSDGSFFLYSKLTVDKSRWEQGDVFSCSVMHEALHNHYTQKSLSLSPG

SEQ ID NO: 1062 - protein, 444 aa, synthetic construct; identical to SEQ ID NO: 386
  source 1..444: note = XENP40941 Chain 2 - SilentFv_H0_Fc(216)_IgG1_PVA_/S267K/S364K/E357Q/H435R/Y436F /K447del

SEQ ID NO: 1063 - protein, 214 aa, synthetic construct; identical to SEQ ID NO: 295
  source 1..214: note = XENP40941 Chain 3 - SilentFv_L0 Light Chain

SEQ ID NO: 1064 - protein, 387 aa, synthetic construct
  source 1..387: note = XENP40942 Chain 1 - human_IL18_4CS_S10C_M51H_N155C_Fc(216)_IgG1_pI(-)_Isosteric _A_C220S/PVA_/S267K/L368D/K370S/K447del
YFGKLESKLCVIRNLNDQVLFIDQGNRPLFEDMTDSDSRDNAPRTIFIISHYKDSQPRGMAVTISVKSEKISTLSSENKIISFKEMNPPDNIKDTKSDIIFFQRSVPGHDNKMQFESSSYEGYFLASEKERDLFKLILKKEDELGDRSIMFTVQCEDEPKSSDKTHTCPPCPAPPVAGPSVFLFPPKPKDTLMISRTPEVTCVVVDVKHEDPEVKFNWYVDGVEVHNAKTKPREEEYNSTYRVVSVLTVLHQDWLNGKEYKCKVSNKALPAPIEKTISKAKGQPREPQVYTLPPSREEMTKNQVSLTCDVSGFYPSDIAVEWESDGQPENNYKTTPPVLDSDGSFFLYSKLTVDKSRWEQGDVFSCSVMHEALHNHYTQKSLSLSPG

SEQ ID NO: 1065 - protein, 444 aa, synthetic construct; identical to SEQ ID NO: 386
  source 1..444: note = XENP40942 Chain 2 - SilentFv_H0_Fc(216)_IgG1_PVA_/S267K/S364K/E357Q/H435R/Y436F /K447del

SEQ ID NO: 1066 - protein, 214 aa, synthetic construct; identical to SEQ ID NO: 295
  source 1..214: note = XENP40942 Chain 3 - SilentFv_L0 Light Chain

SEQ ID NO: 1067 - protein, 387 aa, synthetic construct
  source 1..387: note = XENP40943 Chain 1 - human_IL18_4CS_S10C_M51F_N155C_Fc(216)_IgG1_pI(-)_Isosteric _A_C220S/PVA_/S267K/L368D/K370S/K447del
YFGKLESKLCVIRNLNDQVLFIDQGNRPLFEDMTDSDSRDNAPRTIFIISFYKDSQPRGMAVTISVKSEKISTLSSENKIISFKEMNPPDNIKDTKSDIIFFQRSVPGHDNKMQFESSSYEGYFLASEKERDLFKLILKKEDELGDRSIMFTVQCEDEPKSSDKTHTCPPCPAPPVAGPSVFLFPPKPKDTLMISRTPEVTCVVVDVKHEDPEVKFNWYVDGVEVHNAKTKPREEEYNSTYRVVSVLTVLHQDWLNGKEYKCKVSNKALPAPIEKTISKAKGQPREPQVYTLPPSREEMTKNQVSLTCDVSGFYPSDIAVEWESDGQPENNYKTTPPVLDSDGSFFLYSKLTVDKSRWEQGDVFSCSVMHEALHNHYTQKSLSLSPG

SEQ ID NO: 1068 - protein, 444 aa, synthetic construct; identical to SEQ ID NO: 386
  source 1..444: note = XENP40943 Chain 2 - SilentFv_H0_Fc(216)_IgG1_PVA_/S267K/S364K/E357Q/H435R/Y436F /K447del

SEQ ID NO: 1069 - protein, 214 aa, synthetic construct; identical to SEQ ID NO: 295
  source 1..214: note = XENP40943 Chain 3 - SilentFv_L0 Light Chain

SEQ ID NO: 1070 - protein, 387 aa, synthetic construct
  source 1..387: note = XENP40944 Chain 1 - human_IL18_4CS_S10C_M51Y_N155C_Fc(216)_IgG1_pI(-)_Isosteric _A_C220S/PVA_/S267K/L368D/K370S/K447del
YFGKLESKLCVIRNLNDQVLFIDQGNRPLFEDMTDSDSRDNAPRTIFIISYYKDSQPRGMAVTISVKSEKISTLSSENKIISFKEMNPPDNIKDTKSDIIFFQRSVPGHDNKMQFESSSYEGYFLASEKERDLFKLILKKEDELGDRSIMFTVQCEDEPKSSDKTHTCPPCPAPPVAGPSVFLFPPKPKDTLMISRTPEVTCVVVDVKHEDPEVKFNWYVDGVEVHNAKTKPREEEYNSTYRVVSVLTVLHQDWLNGKEYKCKVSNKALPAPIEKTISKAKGQPREPQVYTLPPSREEMTKNQVSLTCDVSGFYPSDIAVEWESDGQPENNYKTTPPVLDSDGSFFLYSKLTVDKSRWEQGDVFSCSVMHEALHNHYTQKSLSLSPG

SEQ ID NO: 1071 - protein, 444 aa, synthetic construct; identical to SEQ ID NO: 386
  source 1..444: note = XENP40944 Chain 2 - SilentFv_H0_Fc(216)_IgG1_PVA_/S267K/S364K/E357Q/H435R/Y436F /K447del

SEQ ID NO: 1072 - protein, 214 aa, synthetic construct; identical to SEQ ID NO: 295
  source 1..214: note = XENP40944 Chain 3 - SilentFv_L0 Light Chain

SEQ ID NO: 1073 - protein, 387 aa, synthetic construct
  source 1..387: note = XENP40945 Chain 1 - human_IL18_4CS_S10C_S55D_N155C_Fc(216)_IgG1_pI(-)_Isosteric _A_C220S/PVA_/S267K/L368D/K370S/K447del
YFGKLESKLCVIRNLNDQVLFIDQGNRPLFEDMTDSDSRDNAPRTIFIISMYKDDQPRGMAVTISVKSEKISTLSSENKIISFKEMNPPDNIKDTKSDIIFFQRSVPGHDNKMQFESSSYEGYFLASEKERDLFKLILKKEDELGDRSIMFTVQCEDEPKSSDKTHTCPPCPAPPVAGPSVFLFPPKPKDTLMISRTPEVTCVVVDVKHEDPEVKFNWYVDGVEVHNAKTKPREEEYNSTYRVVSVLTVLHQDWLNGKEYKCKVSNKALPAPIEKTISKAKGQPREPQVYTLPPSREEMTKNQVSLTCDVSGFYPSDIAVEWESDGQPENNYKTTPPVLDSDGSFFLYSKLTVDKSRWEQGDVFSCSVMHEALHNHYTQKSLSLSPG

SEQ ID NO: 1074 - protein, 444 aa, synthetic construct; identical to SEQ ID NO: 386
  source 1..444: note = XENP40945 Chain 2 - SilentFv_H0_Fc(216)_IgG1_PVA_/S267K/S364K/E357Q/H435R/Y436F /K447del

SEQ ID NO: 1075 - protein, 214 aa, synthetic construct; identical to SEQ ID NO: 295
  source 1..214: note = XENP40945 Chain 3 - SilentFv_L0 Light Chain

SEQ ID NO: 1076 - protein, 387 aa, synthetic construct
  source 1..387: note = XENP40946 Chain 1 - human_IL18_4CS_S10C_S55E_N155C_Fc(216)_IgG1_pI(-)_Isosteric _A_C220S/PVA_/S267K/L368D/K370S/K447del
YFGKLESKLCVIRNLNDQVLFIDQGNRPLFEDMTDSDSRDNAPRTIFIISMYKDEQPRGMAVTISVKSEKISTLSSENKIISFKEMNPPDNIKDTKSDIIFFQRSVPGHDNKMQFESSSYEGYFLASEKERDLFKLILKKEDELGDRSIMFTVQCEDEPKSSDKTHTCPPCPAPPVAGPSVFLFPPKPKDTLMISRTPEVTCVVVDVKHEDPEVKFNWYVDGVEVHNAKTKPREEEYNSTYRVVSVLTVLHQDWLNGKEYKCKVSNKALPAPIEKTISKAKGQPREPQVYTLPPSREEMTKNQVSLTCDVSGFYPSDIAVEWESDGQPENNYKTTPPVLDSDGSFFLYSKLTVDKSRWEQGDVFSCSVMHEALHNHYTQKSLSLSPG

SEQ ID NO: 1077 - protein, 444 aa, synthetic construct; identical to SEQ ID NO: 386
  source 1..444: note = XENP40946 Chain 2 - SilentFv_H0_Fc(216)_IgG1_PVA_/S267K/S364K/E357Q/H435R/Y436F /K447del

SEQ ID NO: 1078 - protein, 214 aa, synthetic construct; identical to SEQ ID NO: 295
  source 1..214: note = XENP40946 Chain 3 - SilentFv_L0 Light Chain

SEQ ID NO: 1079 - protein, 387 aa, synthetic construct
  source 1..387: note = XENP40947 Chain 1 - human_IL18_4CS_S10C_S55T_N155C_Fc(216)_IgG1_pI(-)_Isosteric _A_C220S/PVA_/S267K/L368D/K370S/K447del
YFGKLESKLCVIRNLNDQVLFIDQGNRPLFEDMTDSDSRDNAPRTIFIISMYKDTQPRGMAVTISVKSEKISTLSSENKIISFKEMNPPDNIKDTKSDIIFFQRSVPGHDNKMQFESSSYEGYFLASEKERDLFKLILKKEDELGDRSIMFTVQCEDEPKSSDKTHTCPPCPAPPVAGPSVFLFPPKPKDTLMISRTPEVTCVVVDVKHEDPEVKFNWYVDGVEVHNAKTKPREEEYNSTYRVVSVLTVLHQDWLNGKEYKCKVSNKALPAPIEKTISKAKGQPREPQVYTLPPSREEMTKNQVSLTCDVSGFYPSDIAVEWESDGQPENNYKTTPPVLDSDGSFFLYSKLTVDKSRWEQGDVFSCSVMHEALHNHYTQKSLSLSPG

SEQ ID NO: 1080 - protein, 444 aa, synthetic construct; identical to SEQ ID NO: 386
  source 1..444: note = XENP40947 Chain 2 - SilentFv_H0_Fc(216)_IgG1_PVA_/S267K/S364K/E357Q/H435R/Y436F /K447del

SEQ ID NO: 1081 - protein, 214 aa, synthetic construct; identical to SEQ ID NO: 295
  source 1..214: note = XENP40947 Chain 3 - SilentFv_L0 Light Chain

SEQ ID NO: 1082 - protein, 387 aa, synthetic construct
  source 1..387: note = XENP40948 Chain 1 - human_IL18_4CS_S10C_P57Q_N155C_Fc(216)_IgG1_pI(-)_Isosteric _A_C220S/PVA_/S267K/L368D/K370S/K447del
YFGKLESKLCVIRNLNDQVLFIDQGNRPLFEDMTDSDSRDNAPRTIFIISMYKDSQQRGMAVTISVKSEKISTLSSENKIISFKEMNPPDNIKDTKSDIIFFQRSVPGHDNKMQFESSSYEGYFLASEKERDLFKLILKKEDELGDRSIMFTVQCEDEPKSSDKTHTCPPCPAPPVAGPSVFLFPPKPKDTLMISRTPEVTCVVVDVKHEDPEVKFNWYVDGVEVHNAKTKPREEEYNSTYRVVSVLTVLHQDWLNGKEYKCKVSNKALPAPIEKTISKAKGQPREPQVYTLPPSREEMTKNQVSLTCDVSGFYPSDIAVEWESDGQPENNYKTTPPVLDSDGSFFLYSKLTVDKSRWEQGDVFSCSVMHEALHNHYTQKSLSLSPG

SEQ ID NO: 1083 - protein, 444 aa, synthetic construct; identical to SEQ ID NO: 386
  source 1..444: note = XENP40948 Chain 2 - SilentFv_H0_Fc(216)_IgG1_PVA_/S267K/S364K/E357Q/H435R/Y436F /K447del

SEQ ID NO: 1084 - protein, 214 aa, synthetic construct; identical to SEQ ID NO: 295
  source 1..214: note = XENP40948 Chain 3 - SilentFv_L0 Light Chain

SEQ ID NO: 1085 - protein, 387 aa, synthetic construct
  source 1..387: note = XENP40949 Chain 1 - human_IL18_4CS_S10C_P57D_N155C_Fc(216)_IgG1_pI(-)_Isosteric _A_C220S/PVA_/S267K/L368D/K370S/K447del
YFGKLESKLCVIRNLNDQVLFIDQGNRPLFEDMTDSDSRDNAPRTIFIISMYKDSQDRGMAVTISVKSEKISTLSSENKIISFKEMNPPDNIKDTKSDIIFFQRSVPGHDNKMQFESSSYEGYFLASEKERDLFKLILKKEDELGDRSIMFTVQCEDEPKSSDKTHTCPPCPAPPVAGPSVFLFPPKPKDTLMISRTPEVTCVVVDVKHEDPEVKFNWYVDGVEVHNAKTKPREEEYNSTYRVVSVLTVLHQDWLNGKEYKCKVSNKALPAPIEKTISKAKGQPREPQVYTLPPSREEMTKNQVSLTCDVSGFYPSDIAVEWESDGQPENNYKTTPPVLDSDGSFFLYSKLTVDKSRWEQGDVFSCSVMHEALHNHYTQKSLSLSPG

SEQ ID NO: 1086 - protein, 444 aa, synthetic construct; identical to SEQ ID NO: 386
  source 1..444: note = XENP40949 Chain 2 - SilentFv_H0_Fc(216)_IgG1_PVA_/S267K/S364K/E357Q/H435R/Y436F /K447del

SEQ ID NO: 1087 - protein, 214 aa, synthetic construct; identical to SEQ ID NO: 295
  source 1..214: note = XENP40949 Chain 3 - SilentFv_L0 Light Chain

SEQ ID NO: 1088 - protein, 387 aa, synthetic construct
  source 1..387: note = XENP40950 Chain 1 - human_IL18_4CS_S10C_P57Y_N155C_Fc(216)_IgG1_pI(-)_Isosteric _A_C220S/PVA_/S267K/L368D/K370S/K447del
YFGKLESKLCVIRNLNDQVLFIDQGNRPLFEDMTDSDSRDNAPRTIFIISMYKDSQYRGMAVTISVKSEKISTLSSENKIISFKEMNPPDNIKDTKSDIIFFQRSVPGHDNKMQFESSSYEGYFLASEKERDLFKLILKKEDELGDRSIMFTVQCEDEPKSSDKTHTCPPCPAPPVAGPSVFLFPPKPKDTLMISRTPEVTCVVVDVKHEDPEVKFNWYVDGVEVHNAKTKPREEEYNSTYRVVSVLTVLHQDWLNGKEYKCKVSNKALPAPIEKTISKAKGQPREPQVYTLPPSREEMTKNQVSLTCDVSGFYPSDIAVEWESDGQPENNYKTTPPVLDSDGSFFLYSKLTVDKSRWEQGDVFSCSVMHEALHNHYTQKSLSLSPG

SEQ ID NO: 1089 - protein, 444 aa, synthetic construct; identical to SEQ ID NO: 386
  source 1..444: note = XENP40950 Chain 2 - SilentFv_H0_Fc(216)_IgG1_PVA_/S267K/S364K/E357Q/H435R/Y436F /K447del

SEQ ID NO: 1090 - protein, 214 aa, synthetic construct; identical to SEQ ID NO: 295
  source 1..214: note = XENP40950 Chain 3 - SilentFv_L0 Light Chain

SEQ ID NO: 1091 - protein, 387 aa, synthetic construct
  source 1..387: note = XENP40951 Chain 1 - human_IL18_4CS_S10C_P57N_N155C_Fc(216)_IgG1_pI(-)_Isosteric _A_C220S/PVA_/S267K/L368D/K370S/K447del
YFGKLESKLCVIRNLNDQVLFIDQGNRPLFEDMTDSDSRDNAPRTIFIISMYKDSQNRGMAVTISVKSEKISTLSSENKIISFKEMNPPDNIKDTKSDIIFFQRSVPGHDNKMQFESSSYEGYFLASEKERDLFKLILKKEDELGDRSIMFTVQCEDEPKSSDKTHTCPPCPAPPVAGPSVFLFPPKPKDTLMISRTPEVTCVVVDVKHEDPEVKFNWYVDGVEVHNAKTKPREEEYNSTYRVVSVLTVLHQDWLNGKEYKCKVSNKALPAPIEKTISKAKGQPREPQVYTLPPSREEMTKNQVSLTCDVSGFYPSDIAVEWESDGQPENNYKTTPPVLDSDGSFFLYSKLTVDKSRWEQGDVFSCSVMHEALHNHYTQKSLSLSPG

SEQ ID NO: 1092 - protein, 444 aa, synthetic construct; identical to SEQ ID NO: 386
  source 1..444: note = XENP40951 Chain 2 - SilentFv_H0_Fc(216)_IgG1_PVA_/S267K/S364K/E357Q/H435R/Y436F /K447del

SEQ ID NO: 1093 - protein, 214 aa, synthetic construct; identical to SEQ ID NO: 295
  source 1..214: note = XENP40951 Chain 3 - SilentFv_L0 Light Chain

SEQ ID NO: 1094 - protein, 387 aa, synthetic construct
  source 1..387: note = XENP40952 Chain 1 - human_IL18_4CS_S10C_M60Y_N155C_Fc(216)_IgG1_pI(-)_Isosteric _A_C220S/PVA_/S267K/L368D/K370S/K447del
YFGKLESKLCVIRNLNDQVLFIDQGNRPLFEDMTDSDSRDNAPRTIFIISMYKDSQPRGYAVTISVKSEKISTLSSENKIISFKEMNPPDNIKDTKSDIIFFQRSVPGHDNKMQFESSSYEGYFLASEKERDLFKLILKKEDELGDRSIMFTVQCEDEPKSSDKTHTCPPCPAPPVAGPSVFLFPPKPKDTLMISRTPEVTCVVVDVKHEDPEVKFNWYVDGVEVHNAKTKPREEEYNSTYRVVSVLTVLHQDWLNGKEYKCKVSNKALPAPIEKTISKAKGQPREPQVYTLPPSREEMTKNQVSLTCDVSGFYPSDIAVEWESDGQPENNYKTTPPVLDSDGSFFLYSKLTVDKSRWEQGDVFSCSVMHEALHNHYTQKSLSLSPG

SEQ ID NO: 1095 - protein, 444 aa, synthetic construct; identical to SEQ ID NO: 386
  source 1..444: note = XENP40952 Chain 2 - SilentFv_H0_Fc(216)_IgG1_PVA_/S267K/S364K/E357Q/H435R/Y436F /K447del

SEQ ID NO: 1096 - protein, 214 aa, synthetic construct; identical to SEQ ID NO: 295
  source 1..214: note = XENP40952 Chain 3 - SilentFv_L0 Light Chain

SEQ ID NO: 1097 - protein, 387 aa, synthetic construct
  source 1..387: note = XENP40953 Chain 1 - human_IL18_4CS_S10C_M60F_N155C_Fc(216)_IgG1_pI(-)_Isosteric _A_C220S/PVA_/S267K/L368D/K370S/K447del
YFGKLESKLCVIRNLNDQVLFIDQGNRPLFEDMTDSDSRDNAPRTIFIISMYKDSQPRGFAVTISVKSEKISTLSSENKIISFKEMNPPDNIKDTKSDIIFFQRSVPGHDNKMQFESSSYEGYFLASEKERDLFKLILKKEDELGDRSIMFTVQCEDEPKSSDKTHTCPPCPAPPVAGPSVFLFPPKPKDTLMISRTPEVTCVVVDVKHEDPEVKFNWYVDGVEVHNAKTKPREEEYNSTYRVVSVLTVLHQDWLNGKEYKCKVSNKALPAPIEKTISKAKGQPREPQVYTLPPSREEMTKNQVSLTCDVSGFYPSDIAVEWESDGQPENNYKTTPPVLDSDGSFFLYSKLTVDKSRWEQGDVFSCSVMHEALHNHYTQKSLSLSPG

SEQ ID NO: 1098 - protein, 444 aa, synthetic construct; identical to SEQ ID NO: 386
  source 1..444: note = XENP40953 Chain 2 - SilentFv_H0_Fc(216)_IgG1_PVA_/S267K/S364K/E357Q/H435R/Y436F /K447del

SEQ ID NO: 1099 - protein, 214 aa, synthetic construct; identical to SEQ ID NO: 295
  source 1..214: note = XENP40953 Chain 3 - SilentFv_L0 Light Chain

SEQ ID NO: 1100 - protein, 387 aa, synthetic construct
  source 1..387: note = XENP40954 Chain 1 - human_IL18_4CS_S10C_D110Q_N155C_Fc(216)_IgG1_pI(-)_Isosteri c_A_C220S/PVA_/S267K/L368D/K370S/K447del
YFGKLESKLCVIRNLNDQVLFIDQGNRPLFEDMTDSDSRDNAPRTIFIISMYKDSQPRGMAVTISVKSEKISTLSSENKIISFKEMNPPDNIKDTKSDIIFFQRSVPGHQNKMQFESSSYEGYFLASEKERDLFKLILKKEDELGDRSIMFTVQCEDEPKSSDKTHTCPPCPAPPVAGPSVFLFPPKPKDTLMISRTPEVTCVVVDVKHEDPEVKFNWYVDGVEVHNAKTKPREEEYNSTYRVVSVLTVLHQDWLNGKEYKCKVSNKALPAPIEKTISKAKGQPREPQVYTLPPSREEMTKNQVSLTCDVSGFYPSDIAVEWESDGQPENNYKTTPPVLDSDGSFFLYSKLTVDKSRWEQGDVFSCSVMHEALHNHYTQKSLSLSPG

SEQ ID NO: 1101 - protein, 444 aa, synthetic construct; identical to SEQ ID NO: 386
  source 1..444: note = XENP40954 Chain 2 - SilentFv_H0_Fc(216)_IgG1_PVA_/S267K/S364K/E357Q/H435R/Y436F /K447del

SEQ ID NO: 1102 - protein, 214 aa, synthetic construct; identical to SEQ ID NO: 295
  source 1..214: note = XENP40954 Chain 3 - SilentFv_L0 Light Chain

SEQ ID NO: 1103 - protein, 387 aa, synthetic construct
  source 1..387: note = XENP40955 Chain 1 - human_IL18_4CS_S10C_D110R_N155C_Fc(216)_IgG1_pI(-)_Isosteri c_A_C220S/PVA_/S267K/L368D/K370S/K447del
YFGKLESKLCVIRNLNDQVLFIDQGNRPLFEDMTDSDSRDNAPRTIFIISMYKDSQPRGMAVTISVKSEKISTLSSENKIISFKEMNPPDNIKDTKSDIIFFQRSVPGHRNKMQFESSSYEGYFLASEKERDLFKLILKKEDELGDRSIMFTVQCEDEPKSSDKTHTCPPCPAPPVAGPSVFLFPPKPKDTLMISRTPEVTCVVVDVKHEDPEVKFNWYVDGVEVHNAKTKPREEEYNSTYRVVSVLTVLHQDWLNGKEYKCKVSNKALPAPIEKTISKAKGQPREPQVYTLPPSREEMTKNQVSLTCDVSGFYPSDIAVEWESDGQPENNYKTTPPVLDSDGSFFLYSKLTVDKSRWEQGDVFSCSVMHEALHNHYTQKSLSLSPG

SEQ ID NO: 1104 - protein, 444 aa, synthetic construct; identical to SEQ ID NO: 386
  source 1..444: note = XENP40955 Chain 2 - SilentFv_H0_Fc(216)_IgG1_PVA_/S267K/S364K/E357Q/H435R/Y436F /K447del

SEQ ID NO: 1105 - protein, 214 aa, synthetic construct; identical to SEQ ID NO: 295
  source 1..214: note = XENP40955 Chain 3 - SilentFv_L0 Light Chain

SEQ ID NO: 1106 - protein, 387 aa, synthetic construct
  source 1..387: note = XENP40956 Chain 1 - human_IL18_4CS_S10C_N111D_N155C_Fc(216)_IgG1_pI(-)_Isosteri c_A_C220S/PVA_/S267K/L368D/K370S/K447del
YFGKLESKLCVIRNLNDQVLFIDQGNRPLFEDMTDSDSRDNAPRTIFIISMYKDSQPRGMAVTISVKSEKISTLSSENKIISFKEMNPPDNIKDTKSDIIFFQRSVPGHDDKMQFESSSYEGYFLASEKERDLFKLILKKEDELGDRSIMFTVQCEDEPKSSDKTHTCPPCPAPPVAGPSVFLFPPKPKDTLMISRTPEVTCVVVDVKHEDPEVKFNWYVDGVEVHNAKTKPREEEYNSTYRVVSVLTVLHQDWLNGKEYKCKVSNKALPAPIEKTISKAKGQPREPQVYTLPPSREEMTKNQVSLTCDVSGFYPSDIAVEWESDGQPENNYKTTPPVLDSDGSFFLYSKLTVDKSRWEQGDVFSCSVMHEALHNHYTQKSLSLSPG

SEQ ID NO: 1107 - protein, 444 aa, synthetic construct; identical to SEQ ID NO: 386
  source 1..444: note = XENP40956 Chain 2 - SilentFv_H0_Fc(216)_IgG1_PVA_/S267K/S364K/E357Q/H435R/Y436F /K447del

SEQ ID NO: 1108 - protein, 214 aa, synthetic construct; identical to SEQ ID NO: 295
  source 1..214: note = XENP40956 Chain 3 - SilentFv_L0 Light Chain

SEQ ID NO: 1109 - protein, 387 aa, synthetic construct
  source 1..387: note = XENP40957 Chain 1 - human_IL18_4CS_S10C_N111S_N155C_Fc(216)_IgG1_pI(-)_Isosteri c_A_C220S/PVA_/S267K/L368D/K370S/K447del
YFGKLESKLCVIRNLNDQVLFIDQGNRPLFEDMTDSDSRDNAPRTIFIISMYKDSQPRGMAVTISVKSEKISTLSSENKIISFKEMNPPDNIKDTKSDIIFFQRSVPGHDSKMQFESSSYEGYFLASEKERDLFKLILKKEDELGDRSIMFTVQCEDEPKSSDKTHTCPPCPAPPVAGPSVFLFPPKPKDTLMISRTPEVTCVVVDVKHEDPEVKFNWYVDGVEVHNAKTKPREEEYNSTYRVVSVLTVLHQDWLNGKEYKCKVSNKALPAPIEKTISKAKGQPREPQVYTLPPSREEMTKNQVSLTCDVSGFYPSDIAVEWESDGQPENNYKTTPPVLDSDGSFFLYSKLTVDKSRWEQGDVFSCSVMHEALHNHYTQKSLSLSPG

SEQ ID NO: 1110 - protein, 444 aa, synthetic construct; identical to SEQ ID NO: 386
  source 1..444: note = XENP40957 Chain 2 - SilentFv_H0_Fc(216)_IgG1_PVA_/S267K/S364K/E357Q/H435R/Y436F /K447del

SEQ ID NO: 1111 - protein, 214 aa, synthetic construct; identical to SEQ ID NO: 295
  source 1..214: note = XENP40957 Chain 3 - SilentFv_L0 Light Chain

SEQ ID NO: 1112 - protein, 387 aa, synthetic construct
  source 1..387: note = XENP40958 Chain 1 - human_IL18_4CS_S10C_N111T_N155C_Fc(216)_IgG1_pI(-)_Isosteri c_A_C220S/PVA_/S267K/L368D/K370S/K447del
YFGKLESKLCVIRNLNDQVLFIDQGNRPLFEDMTDSDSRDNAPRTIFIISMYKDSQPRGMAVTISVKSEKISTLSSENKIISFKEMNPPDNIKDTKSDIIFFQRSVPGHDTKMQFESSSYEGYFLASEKERDLFKLILKKEDELGDRSIMFTVQCEDEPKSSDKTHTCPPCPAPPVAGPSVFLFPPKPKDTLMISRTPEVTCVVVDVKHEDPEVKFNWYVDGVEVHNAKTKPREEEYNSTYRVVSVLTVLHQDWLNGKEYKCKVSNKALPAPIEKTISKAKGQPREPQVYTLPPSREEMTKNQVSLTCDVSGFYPSDIAVEWESDGQPENNYKTTPPVLDSDGSFFLYSKLTVDKSRWEQGDVFSCSVMHEALHNHYTQKSLSLSPG

SEQ ID NO: 1113 - protein, 444 aa, synthetic construct; identical to SEQ ID NO: 386
  source 1..444: note = XENP40958 Chain 2 - SilentFv_H0_Fc(216)_IgG1_PVA_/S267K/S364K/E357Q/H435R/Y436F /K447del

SEQ ID NO: 1114 - protein, 214 aa, synthetic construct; identical to SEQ ID NO: 295
  source 1..214: note = XENP40958 Chain 3 - SilentFv_L0 Light Chain

SEQ ID NO: 1115 - protein, 387 aa, synthetic construct
  source 1..387: note = XENP40959 Chain 1 - human_IL18_4CS_S10C_N111E_N155C_Fc(216)_IgG1_pI(-)_Isosteri c_A_C220S/PVA_/S267K/L368D/K370S/K447del
YFGKLESKLCVIRNLNDQVLFIDQGNRPLFEDMTDSDSRDNAPRTIFIISMYKDSQPRGMAVTISVKSEKISTLSSENKIISFKEMNPPDNIKDTKSDIIFFQRSVPGHDEKMQFESSSYEGYFLASEKERDLFKLILKKEDELGDRSIMFTVQCEDEPKSSDKTHTCPPCPAPPVAGPSVFLFPPKPKDTLMISRTPEVTCVVVDVKHEDPEVKFNWYVDGVEVHNAKTKPREEEYNSTYRVVSVLTVLHQDWLNGKEYKCKVSNKALPAPIEKTISKAKGQPREPQVYTLPPSREEMTKNQVSLTCDVSGFYPSDIAVEWESDGQPENNYKTTPPVLDSDGSFFLYSKLTVDKSRWEQGDVFSCSVMHEALHNHYTQKSLSLSPG

SEQ ID NO: 1116 - protein, 444 aa, synthetic construct; identical to SEQ ID NO: 386
  source 1..444: note = XENP40959 Chain 2 - SilentFv_H0_Fc(216)_IgG1_PVA_/S267K/S364K/E357Q/H435R/Y436F /K447del

SEQ ID NO: 1117 - protein, 214 aa, synthetic construct; identical to SEQ ID NO: 295
  source 1..214: note = XENP40959 Chain 3 - SilentFv_L0 Light Chain

SEQ ID NO: 1118 - protein, 387 aa, synthetic construct
  source 1..387: note = XENP40960 Chain 1 - human_IL18_4CS_S10C_D132Q_N155C_Fc(216)_IgG1_pI(-)_Isosteri c_A_C220S/PVA_/S267K/L368D/K370S/K447del
YFGKLESKLCVIRNLNDQVLFIDQGNRPLFEDMTDSDSRDNAPRTIFIISMYKDSQPRGMAVTISVKSEKISTLSSENKIISFKEMNPPDNIKDTKSDIIFFQRSVPGHDNKMQFESSSYEGYFLASEKERQLFKLILKKEDELGDRSIMFTVQCEDEPKSSDKTHTCPPCPAPPVAGPSVFLFPPKPKDTLMISRTPEVTCVVVDVKHEDPEVKFNWYVDGVEVHNAKTKPREEEYNSTYRVVSVLTVLHQDWLNGKEYKCKVSNKALPAPIEKTISKAKGQPREPQVYTLPPSREEMTKNQVSLTCDVSGFYPSDIAVEWESDGQPENNYKTTPPVLDSDGSFFLYSKLTVDKSRWEQGDVFSCSVMHEALHNHYTQKSLSLSPG

SEQ ID NO: 1119 - protein, 444 aa, synthetic construct; identical to SEQ ID NO: 386
  source 1..444: note = XENP40960 Chain 2 - SilentFv_H0_Fc(216)_IgG1_PVA_/S267K/S364K/E357Q/H435R/Y436F /K447del

SEQ ID NO: 1120 - protein, 214 aa, synthetic construct; identical to SEQ ID NO: 295
  source 1..214: note = XENP40960 Chain 3 - SilentFv_L0 Light Chain

SEQ ID NO: 1121 - protein, 387 aa, synthetic construct
  source 1..387: note = XENP40961 Chain 1 - human_IL18_4CS_S10C_D132E_N155C_Fc(216)_IgG1_pI(-)_Isosteri c_A_C220S/PVA_/S267K/L368D/K370S/K447del
YFGKLESKLCVIRNLNDQVLFIDQGNRPLFEDMTDSDSRDNAPRTIFIISMYKDSQPRGMAVTISVKSEKISTLSSENKIISFKEMNPPDNIKDTKSDIIFFQRSVPGHDNKMQFESSSYEGYFLASEKERELFKLILKKEDELGDRSIMFTVQCEDEPKSSDKTHTCPPCPAPPVAGPSVFLFPPKPKDTLMISRTPEVTCVVVDVKHEDPEVKFNWYVDGVEVHNAKTKPREEEYNSTYRVVSVLTVLHQDWLNGKEYKCKVSNKALPAPIEKTISKAKGQPREPQVYTLPPSREEMTKNQVSLTCDVSGFYPSDIAVEWESDGQPENNYKTTPPVLDSDGSFFLYSKLTVDKSRWEQGDVFSCSVMHEALHNHYTQKSLSLSPG

SEQ ID NO: 1122 - protein, 444 aa, synthetic construct; identical to SEQ ID NO: 386
  source 1..444: note = XENP40961 Chain 2 - SilentFv_H0_Fc(216)_IgG1_PVA_/S267K/S364K/E357Q/H435R/Y436F /K447del

SEQ ID NO: 1123 - protein, 214 aa, synthetic construct; identical to SEQ ID NO: 295
  source 1..214: note = XENP40961 Chain 3 - SilentFv_L0 Light Chain

SEQ ID NO: 1124 - protein, 387 aa, synthetic construct; identical to SEQ ID NO: 976
  source 1..387: note = XENP41076 Chain 1 - human_IL18_4CS_S10C_N155C_Fc(216)_IgG1_pI(-)_Isosteric_A_C2 20S/PVA_/S267K/L368D/K370S/K447del

SEQ ID NO: 1125 - protein, 444 aa, synthetic construct; identical to SEQ ID NO: 386
  source 1..444: note = XENP41076 Chain 2 - SilentFv_H0_Fc(216)_IgG1_PVA_/S267K/S364K/E357Q/H435R/Y436F /K447del

SEQ ID NO: 1126 - protein, 214 aa, synthetic construct; identical to SEQ ID NO: 295
  source 1..214: note = XENP41076 Chain 3 - SilentFv_L0 Light Chain

SEQ ID NO: 1127 - protein, 387 aa, synthetic construct
  source 1..387: note = XENP41077 Chain 1 - human_IL18_4CS_S10C_S76G_N155C_Fc(216)_IgG1_pI(-)_Isosteric _A_C220S/PVA_/S267K/L368D/K370S/K447del
YFGKLESKLCVIRNLNDQVLFIDQGNRPLFEDMTDSDSRDNAPRTIFIISMYKDSQPRGMAVTISVKSEKISTLSGENKIISFKEMNPPDNIKDTKSDIIFFQRSVPGHDNKMQFESSSYEGYFLASEKERDLFKLILKKEDELGDRSIMFTVQCEDEPKSSDKTHTCPPCPAPPVAGPSVFLFPPKPKDTLMISRTPEVTCVVVDVKHEDPEVKFNWYVDGVEVHNAKTKPREEEYNSTYRVVSVLTVLHQDWLNGKEYKCKVSNKALPAPIEKTISKAKGQPREPQVYTLPPSREEMTKNQVSLTCDVSGFYPSDIAVEWESDGQPENNYKTTPPVLDSDGSFFLYSKLTVDKSRWEQGDVFSCSVMHEALHNHYTQKSLSLSPG

SEQ ID NO: 1128 - protein, 444 aa, synthetic construct; identical to SEQ ID NO: 386
  source 1..444: note = XENP41077 Chain 2 - SilentFv_H0_Fc(216)_IgG1_PVA_/S267K/S364K/E357Q/H435R/Y436F /K447del

SEQ ID NO: 1129 - protein, 214 aa, synthetic construct; identical to SEQ ID NO: 295
  source 1..214: note = XENP41077 Chain 3 - SilentFv_L0 Light Chain

SEQ ID NO: 1130 - protein, 387 aa, synthetic construct
  source 1..387: note = XENP41078 Chain 1 - human_IL18_4CS_S10C_S76A_N155C_Fc(216)_IgG1_pI(-)_Isosteric _A_C220S/PVA_/S267K/L368D/K370S/K447del
YFGKLESKLCVIRNLNDQVLFIDQGNRPLFEDMTDSDSRDNAPRTIFIISMYKDSQPRGMAVTISVKSEKISTLSAENKIISFKEMNPPDNIKDTKSDIIFFQRSVPGHDNKMQFESSSYEGYFLASEKERDLFKLILKKEDELGDRSIMFTVQCEDEPKSSDKTHTCPPCPAPPVAGPSVFLFPPKPKDTLMISRTPEVTCVVVDVKHEDPEVKFNWYVDGVEVHNAKTKPREEEYNSTYRVVSVLTVLHQDWLNGKEYKCKVSNKALPAPIEKTISKAKGQPREPQVYTLPPSREEMTKNQVSLTCDVSGFYPSDIAVEWESDGQPENNYKTTPPVLDSDGSFFLYSKLTVDKSRWEQGDVFSCSVMHEALHNHYTQKSLSLSPG

SEQ ID NO: 1131 - protein, 444 aa, synthetic construct; identical to SEQ ID NO: 386
  source 1..444: note = XENP41078 Chain 2 - SilentFv_H0_Fc(216)_IgG1_PVA_/S267K/S364K/E357Q/H435R/Y436F /K447del

SEQ ID NO: 1132 - protein, 214 aa, synthetic construct; identical to SEQ ID NO: 295
  source 1..214: note = XENP41078 Chain 3 - SilentFv_L0 Light Chain

SEQ ID NO: 1133 - protein, 387 aa, synthetic construct
  source 1..387: note = XENP41079 Chain 1 - human_IL18_4CS_S10C_M51K_K53D_N155C_Fc(216)_IgG1_pI(-)_Isos teric_A_C220S/PVA_/S267K/L368D/K370S/K447del
YFGKLESKLCVIRNLNDQVLFIDQGNRPLFEDMTDSDSRDNAPRTIFIISKYDDSQPRGMAVTISVKSEKISTLSSENKIISFKEMNPPDNIKDTKSDIIFFQRSVPGHDNKMQFESSSYEGYFLASEKERDLFKLILKKEDELGDRSIMFTVQCEDEPKSSDKTHTCPPCPAPPVAGPSVFLFPPKPKDTLMISRTPEVTCVVVDVKHEDPEVKFNWYVDGVEVHNAKTKPREEEYNSTYRVVSVLTVLHQDWLNGKEYKCKVSNKALPAPIEKTISKAKGQPREPQVYTLPPSREEMTKNQVSLTCDVSGFYPSDIAVEWESDGQPENNYKTTPPVLDSDGSFFLYSKLTVDKSRWEQGDVFSCSVMHEALHNHYTQKSLSLSPG

SEQ ID NO: 1134 - protein, 444 aa, synthetic construct; identical to SEQ ID NO: 386
  source 1..444: note = XENP41079 Chain 2 - SilentFv_H0_Fc(216)_IgG1_PVA_/S267K/S364K/E357Q/H435R/Y436F /K447del

SEQ ID NO: 1135 - protein, 214 aa, synthetic construct; identical to SEQ ID NO: 295
  source 1..214: note = XENP41079 Chain 3 - SilentFv_L0 Light Chain

SEQ ID NO: 1136 - protein, 387 aa, synthetic construct
  source 1..387: note = XENP41080 Chain 1 - human_IL18_4CS_S10C_M51K_K53E_N155C_Fc(216)_IgG1_pI(-)_Isos teric_A_C220S/PVA_/S267K/L368D/K370S/K447del
YFGKLESKLCVIRNLNDQVLFIDQGNRPLFEDMTDSDSRDNAPRTIFIISKYEDSQPRGMAVTISVKSEKISTLSSENKIISFKEMNPPDNIKDTKSDIIFFQRSVPGHDNKMQFESSSYEGYFLASEKERDLFKLILKKEDELGDRSIMFTVQCEDEPKSSDKTHTCPPCPAPPVAGPSVFLFPPKPKDTLMISRTPEVTCVVVDVKHEDPEVKFNWYVDGVEVHNAKTKPREEEYNSTYRVVSVLTVLHQDWLNGKEYKCKVSNKALPAPIEKTISKAKGQPREPQVYTLPPSREEMTKNQVSLTCDVSGFYPSDIAVEWESDGQPENNYKTTPPVLDSDGSFFLYSKLTVDKSRWEQGDVFSCSVMHEALHNHYTQKSLSLSPG

SEQ ID NO: 1137 - protein, 444 aa, synthetic construct; identical to SEQ ID NO: 386
  source 1..444: note = XENP41080 Chain 2 - SilentFv_H0_Fc(216)_IgG1_PVA_/S267K/S364K/E357Q/H435R/Y436F /K447del

SEQ ID NO: 1138 - protein, 214 aa, synthetic construct; identical to SEQ ID NO: 295
  source 1..214: note = XENP41080 Chain 3 - SilentFv_L0 Light Chain

SEQ ID NO: 1139 - protein, 387 aa, synthetic construct
  source 1..387: note = XENP41081 Chain 1 - human_IL18_4CS_E6Q_S10C_K53E_N155C_Fc(216)_IgG1_pI(-)_Isost eric_A_C220S/PVA_/S267K/L368D/K370S/K447del
YFGKLQSKLCVIRNLNDQVLFIDQGNRPLFEDMTDSDSRDNAPRTIFIISMYEDSQPRGMAVTISVKSEKISTLSSENKIISFKEMNPPDNIKDTKSDIIFFQRSVPGHDNKMQFESSSYEGYFLASEKERDLFKLILKKEDELGDRSIMFTVQCEDEPKSSDKTHTCPPCPAPPVAGPSVFLFPPKPKDTLMISRTPEVTCVVVDVKHEDPEVKFNWYVDGVEVHNAKTKPREEEYNSTYRVVSVLTVLHQDWLNGKEYKCKVSNKALPAPIEKTISKAKGQPREPQVYTLPPSREEMTKNQVSLTCDVSGFYPSDIAVEWESDGQPENNYKTTPPVLDSDGSFFLYSKLTVDKSRWEQGDVFSCSVMHEALHNHYTQKSLSLSPG

SEQ ID NO: 1140 - protein, 444 aa, synthetic construct; identical to SEQ ID NO: 386
  source 1..444: note = XENP41081 Chain 2 - SilentFv_H0_Fc(216)_IgG1_PVA_/S267K/S364K/E357Q/H435R/Y436F /K447del

SEQ ID NO: 1141 - protein, 214 aa, synthetic construct; identical to SEQ ID NO: 295
  source 1..214: note = XENP41081 Chain 3 - SilentFv_L0 Light Chain

SEQ ID NO: 1142 - protein, 387 aa, synthetic construct
  source 1..387: note = XENP41082 Chain 1 - human_IL18_4CS_E6Q_S10C_M51K_K53E_N155C_Fc(216)_IgG1_pI(-)_ Isosteric_A_C220S/PVA_/S267K/L368D/K370S/K447del
YFGKLQSKLCVIRNLNDQVLFIDQGNRPLFEDMTDSDSRDNAPRTIFIISKYEDSQPRGMAVTISVKSEKISTLSSENKIISFKEMNPPDNIKDTKSDIIFFQRSVPGHDNKMQFESSSYEGYFLASEKERDLFKLILKKEDELGDRSIMFTVQCEDEPKSSDKTHTCPPCPAPPVAGPSVFLFPPKPKDTLMISRTPEVTCVVVDVKHEDPEVKFNWYVDGVEVHNAKTKPREEEYNSTYRVVSVLTVLHQDWLNGKEYKCKVSNKALPAPIEKTISKAKGQPREPQVYTLPPSREEMTKNQVSLTCDVSGFYPSDIAVEWESDGQPENNYKTTPPVLDSDGSFFLYSKLTVDKSRWEQGDVFSCSVMHEALHNHYTQKSLSLSPG

SEQ ID NO: 1143 - protein, 444 aa, synthetic construct; identical to SEQ ID NO: 386
  source 1..444: note = XENP41082 Chain 2 - SilentFv_H0_Fc(216)_IgG1_PVA_/S267K/S364K/E357Q/H435R/Y436F /K447del

SEQ ID NO: 1144 - protein, 214 aa, synthetic construct; identical to SEQ ID NO: 295
  source 1..214: note = XENP41082 Chain 3 - SilentFv_L0 Light Chain

SEQ ID NO: 1145 - protein, 387 aa, synthetic construct
  source 1..387: note = XENP41083 Chain 1 - human_IL18_4CS_E6Q_S10C_M51K_P57E_N155C_Fc(216)_IgG1_pI(-)_ Isosteric_A_C220S/PVA_/S267K/L368D/K370S/K447del
YFGKLQSKLCVIRNLNDQVLFIDQGNRPLFEDMTDSDSRDNAPRTIFIISKYKDSQERGMAVTISVKSEKISTLSSENKIISFKEMNPPDNIKDTKSDIIFFQRSVPGHDNKMQFESSSYEGYFLASEKERDLFKLILKKEDELGDRSIMFTVQCEDEPKSSDKTHTCPPCPAPPVAGPSVFLFPPKPKDTLMISRTPEVTCVVVDVKHEDPEVKFNWYVDGVEVHNAKTKPREEEYNSTYRVVSVLTVLHQDWLNGKEYKCKVSNKALPAPIEKTISKAKGQPREPQVYTLPPSREEMTKNQVSLTCDVSGFYPSDIAVEWESDGQPENNYKTTPPVLDSDGSFFLYSKLTVDKSRWEQGDVFSCSVMHEALHNHYTQKSLSLSPG

SEQ ID NO: 1146 - protein, 444 aa, synthetic construct; identical to SEQ ID NO: 386
  source 1..444: note = XENP41083 Chain 2 - SilentFv_H0_Fc(216)_IgG1_PVA_/S267K/S364K/E357Q/H435R/Y436F /K447del

SEQ ID NO: 1147 - protein, 214 aa, synthetic construct; identical to SEQ ID NO: 295
  source 1..214: note = XENP41083 Chain 3 - SilentFv_L0 Light Chain

SEQ ID NO: 1148 - protein, 387 aa, synthetic construct
  source 1..387: note = XENP41084 Chain 1 - human_IL18_4CS_S10C_M51K_P57E_N155C_Fc(216)_IgG1_pI(-)_Isos teric_A_C220S/PVA_/S267K/L368D/K370S/K447del
YFGKLESKLCVIRNLNDQVLFIDQGNRPLFEDMTDSDSRDNAPRTIFIISKYKDSQERGMAVTISVKSEKISTLSSENKIISFKEMNPPDNIKDTKSDIIFFQRSVPGHDNKMQFESSSYEGYFLASEKERDLFKLILKKEDELGDRSIMFTVQCEDEPKSSDKTHTCPPCPAPPVAGPSVFLFPPKPKDTLMISRTPEVTCVVVDVKHEDPEVKFNWYVDGVEVHNAKTKPREEEYNSTYRVVSVLTVLHQDWLNGKEYKCKVSNKALPAPIEKTISKAKGQPREPQVYTLPPSREEMTKNQVSLTCDVSGFYPSDIAVEWESDGQPENNYKTTPPVLDSDGSFFLYSKLTVDKSRWEQGDVFSCSVMHEALHNHYTQKSLSLSPG

SEQ ID NO: 1149 - protein, 444 aa, synthetic construct; identical to SEQ ID NO: 386
  source 1..444: note = XENP41084 Chain 2 - SilentFv_H0_Fc(216)_IgG1_PVA_/S267K/S364K/E357Q/H435R/Y436F /K447del

SEQ ID NO: 1150 - protein, 214 aa, synthetic construct; identical to SEQ ID NO: 295
  source 1..214: note = XENP41084 Chain 3 - SilentFv_L0 Light Chain

SEQ ID NO: 1151 - protein, 387 aa, synthetic construct
  source 1..387: note = XENP41085 Chain 1 - human_IL18_4CS_E6Q_S10C_P57E_N155C_Fc(216)_IgG1_pI(-)_Isost eric_A_C220S/PVA_/S267K/L368D/K370S/K447del
YFGKLQSKLCVIRNLNDQVLFIDQGNRPLFEDMTDSDSRDNAPRTIFIISMYKDSQERGMAVTISVKSEKISTLSSENKIISFKEMNPPDNIKDTKSDIIFFQRSVPGHDNKMQFESSSYEGYFLASEKERDLFKLILKKEDELGDRSIMFTVQCEDEPKSSDKTHTCPPCPAPPVAGPSVFLFPPKPKDTLMISRTPEVTCVVVDVKHEDPEVKFNWYVDGVEVHNAKTKPREEEYNSTYRVVSVLTVLHQDWLNGKEYKCKVSNKALPAPIEKTISKAKGQPREPQVYTLPPSREEMTKNQVSLTCDVSGFYPSDIAVEWESDGQPENNYKTTPPVLDSDGSFFLYSKLTVDKSRWEQGDVFSCSVMHEALHNHYTQKSLSLSPG

SEQ ID NO: 1152 - protein, 444 aa, synthetic construct; identical to SEQ ID NO: 386
  source 1..444: note = XENP41085 Chain 2 - SilentFv_H0_Fc(216)_IgG1_PVA_/S267K/S364K/E357Q/H435R/Y436F /K447del

SEQ ID NO: 1153 - protein, 214 aa, synthetic construct; identical to SEQ ID NO: 295
  source 1..214: note = XENP41085 Chain 3 - SilentFv_L0 Light Chain

SEQ ID NO: 1154 - protein, 387 aa, synthetic construct
  source 1..387: note = XENP41086 Chain 1 - human_IL18_4CS_S10C_E31Q_K53T_N155C_Fc(216)_IgG1_pI(-)_Isos teric_A_C220S/PVA_/S267K/L368D/K370S/K447del
YFGKLESKLCVIRNLNDQVLFIDQGNRPLFQDMTDSDSRDNAPRTIFIISMYTDSQPRGMAVTISVKSEKISTLSSENKIISFKEMNPPDNIKDTKSDIIFFQRSVPGHDNKMQFESSSYEGYFLASEKERDLFKLILKKEDELGDRSIMFTVQCEDEPKSSDKTHTCPPCPAPPVAGPSVFLFPPKPKDTLMISRTPEVTCVVVDVKHEDPEVKFNWYVDGVEVHNAKTKPREEEYNSTYRVVSVLTVLHQDWLNGKEYKCKVSNKALPAPIEKTISKAKGQPREPQVYTLPPSREEMTKNQVSLTCDVSGFYPSDIAVEWESDGQPENNYKTTPPVLDSDGSFFLYSKLTVDKSRWEQGDVFSCSVMHEALHNHYTQKSLSLSPG

SEQ ID NO: 1155 - protein, 444 aa, synthetic construct; identical to SEQ ID NO: 386
  source 1..444: note = XENP41086 Chain 2 - SilentFv_H0_Fc(216)_IgG1_PVA_/S267K/S364K/E357Q/H435R/Y436F /K447del

SEQ ID NO: 1156 - protein, 214 aa, synthetic construct; identical to SEQ ID NO: 295
  source 1..214: note = XENP41086 Chain 3 - SilentFv_L0 Light Chain

SEQ ID NO: 1157 - protein, 387 aa, synthetic construct
  source 1..387: note = XENP41087 Chain 1 - human_IL18_4CS_S10C_K53G_P57E_N155C_Fc(216)_IgG1_pI(-)_Isos teric_A_C220S/PVA_/S267K/L368D/K370S/K447del
YFGKLESKLCVIRNLNDQVLFIDQGNRPLFEDMTDSDSRDNAPRTIFIISMYGDSQERGMAVTISVKSEKISTLSSENKIISFKEMNPPDNIKDTKSDIIFFQRSVPGHDNKMQFESSSYEGYFLASEKERDLFKLILKKEDELGDRSIMFTVQCEDEPKSSDKTHTCPPCPAPPVAGPSVFLFPPKPKDTLMISRTPEVTCVVVDVKHEDPEVKFNWYVDGVEVHNAKTKPREEEYNSTYRVVSVLTVLHQDWLNGKEYKCKVSNKALPAPIEKTISKAKGQPREPQVYTLPPSREEMTKNQVSLTCDVSGFYPSDIAVEWESDGQPENNYKTTPPVLDSDGSFFLYSKLTVDKSRWEQGDVFSCSVMHEALHNHYTQKSLSLSPG

SEQ ID NO: 1158 - protein, 444 aa, synthetic construct; identical to SEQ ID NO: 386
  source 1..444: note = XENP41087 Chain 2 - SilentFv_H0_Fc(216)_IgG1_PVA_/S267K/S364K/E357Q/H435R/Y436F /K447del

SEQ ID NO: 1159 - protein, 214 aa, synthetic construct; identical to SEQ ID NO: 295
  source 1..214: note = XENP41087 Chain 3 - SilentFv_L0 Light Chain

SEQ ID NO: 1160 - protein, 387 aa, synthetic construct
  source 1..387: note = XENP41088 Chain 1 - human_IL18_4CS_S10C_K53T_P57E_N155C_Fc(216)_IgG1_pI(-)_Isos teric_A_C220S/PVA_/S267K/L368D/K370S/K447del
YFGKLESKLCVIRNLNDQVLFIDQGNRPLFEDMTDSDSRDNAPRTIFIISMYTDSQERGMAVTISVKSEKISTLSSENKIISFKEMNPPDNIKDTKSDIIFFQRSVPGHDNKMQFESSSYEGYFLASEKERDLFKLILKKEDELGDRSIMFTVQCEDEPKSSDKTHTCPPCPAPPVAGPSVFLFPPKPKDTLMISRTPEVTCVVVDVKHEDPEVKFNWYVDGVEVHNAKTKPREEEYNSTYRVVSVLTVLHQDWLNGKEYKCKVSNKALPAPIEKTISKAKGQPREPQVYTLPPSREEMTKNQVSLTCDVSGFYPSDIAVEWESDGQPENNYKTTPPVLDSDGSFFLYSKLTVDKSRWEQGDVFSCSVMHEALHNHYTQKSLSLSPG

SEQ ID NO: 1161 - protein, 444 aa, synthetic construct; identical to SEQ ID NO: 386
  source 1..444: note = XENP41088 Chain 2 - SilentFv_H0_Fc(216)_IgG1_PVA_/S267K/S364K/E357Q/H435R/Y436F /K447del

SEQ ID NO: 1162 - protein, 214 aa, synthetic construct; identical to SEQ ID NO: 295
  source 1..214: note = XENP41088 Chain 3 - SilentFv_L0 Light Chain

SEQ ID NO: 1163 - protein, 387 aa, synthetic construct
  source 1..387: note = XENP41089 Chain 1 - human_IL18_4CS_S10C_K53A_P57E_N155C_Fc(216)_IgG1_pI(-)_Isos teric_A_C220S/PVA_/S267K/L368D/K370S/K447del
YFGKLESKLCVIRNLNDQVLFIDQGNRPLFEDMTDSDSRDNAPRTIFIISMYADSQERGMAVTISVKSEKISTLSSENKIISFKEMNPPDNIKDTKSDIIFFQRSVPGHDNKMQFESSSYEGYFLASEKERDLFKLILKKEDELGDRSIMFTVQCEDEPKSSDKTHTCPPCPAPPVAGPSVFLFPPKPKDTLMISRTPEVTCVVVDVKHEDPEVKFNWYVDGVEVHNAKTKPREEEYNSTYRVVSVLTVLHQDWLNGKEYKCKVSNKALPAPIEKTISKAKGQPREPQVYTLPPSREEMTKNQVSLTCDVSGFYPSDIAVEWESDGQPENNYKTTPPVLDSDGSFFLYSKLTVDKSRWEQGDVFSCSVMHEALHNHYTQKSLSLSPG

SEQ ID NO: 1164 - protein, 444 aa, synthetic construct; identical to SEQ ID NO: 386
  source 1..444: note = XENP41089 Chain 2 - SilentFv_H0_Fc(216)_IgG1_PVA_/S267K/S364K/E357Q/H435R/Y436F /K447del

SEQ ID NO: 1165 - protein, 214 aa, synthetic construct; identical to SEQ ID NO: 295
  source 1..214: note = XENP41089 Chain 3 - SilentFv_L0 Light Chain

SEQ ID NO: 1166 - protein, 387 aa, synthetic construct
  source 1..387: note = XENP41090 Chain 1 - human_IL18_4CS_S10C_P57E_N155C_Fc(216)_IgG1_pI(-)_Isosteric _A_C220S/PVA_/S267K/L368D/K370S/K447del
YFGKLESKLCVIRNLNDQVLFIDQGNRPLFEDMTDSDSRDNAPRTIFIISMYKDSQERGMAVTISVKSEKISTLSSENKIISFKEMNPPDNIKDTKSDIIFFQRSVPGHDNKMQFESSSYEGYFLASEKERDLFKLILKKEDELGDRSIMFTVQCEDEPKSSDKTHTCPPCPAPPVAGPSVFLFPPKPKDTLMISRTPEVTCVVVDVKHEDPEVKFNWYVDGVEVHNAKTKPREEEYNSTYRVVSVLTVLHQDWLNGKEYKCKVSNKALPAPIEKTISKAKGQPREPQVYTLPPSREEMTKNQVSLTCDVSGFYPSDIAVEWESDGQPENNYKTTPPVLDSDGSFFLYSKLTVDKSRWEQGDVFSCSVMHEALHNHYTQKSLSLSPG

SEQ ID NO: 1167 - protein, 444 aa, synthetic construct; identical to SEQ ID NO: 386
  source 1..444: note = XENP41090 Chain 2 - SilentFv_H0_Fc(216)_IgG1_PVA_/S267K/S364K/E357Q/H435R/Y436F /K447del

SEQ ID NO: 1168 - protein, 214 aa, synthetic construct; identical to SEQ ID NO: 295
  source 1..214: note = XENP41090 Chain 3 - SilentFv_L0 Light Chain

SEQ ID NO: 1169 - protein, 387 aa, synthetic construct; identical to SEQ ID NO: 988
  source 1..387: note = XENP41091 Chain 1 - human_IL18_4CS_S10C_K53D_N155C_Fc(216)_IgG1_pI(-)_Isosteric _A_C220S/PVA_/S267K/L368D/K370S/K447del

SEQ ID NO: 1170 - protein, 444 aa, synthetic construct; identical to SEQ ID NO: 386
  source 1..444: note = XENP41091 Chain 2 - SilentFv_H0_Fc(216)_IgG1_PVA_/S267K/S364K/E357Q/H435R/Y436F /K447del

SEQ ID NO: 1171 - protein, 214 aa, synthetic construct; identical to SEQ ID NO: 295
  source 1..214: note = XENP41091 Chain 3 - SilentFv_L0 Light Chain

SEQ ID NO: 1172 - protein, 387 aa, synthetic construct; identical to SEQ ID NO: 1002
  source 1..387: note = XENP41092 Chain 1 - human_IL18_4CS_S10C_E31Q_N41Q_N155C_Fc(216)_IgG1_pI(-)_Isos teric_A_C220S/PVA_/S267K/L368D/K370S/K447del

SEQ ID NO: 1173 - protein, 444 aa, synthetic construct; identical to SEQ ID NO: 386
  source 1..444: note = XENP41092 Chain 2 - SilentFv_H0_Fc(216)_IgG1_PVA_/S267K/S364K/E357Q/H435R/Y436F /K447del

SEQ ID NO: 1174 - protein, 214 aa, synthetic construct; identical to SEQ ID NO: 295
  source 1..214: note = XENP41092 Chain 3 - SilentFv_L0 Light Chain

SEQ ID NO: 1175 - protein, 387 aa, synthetic construct
  source 1..387: note = XENP41093 Chain 1 - human_IL18_4CS_S10C_K53A_N155C_Fc(216)_IgG1_pI(-)_Isosteric _A_C220S/PVA_/S267K/L368D/K370S/K447del
YFGKLESKLCVIRNLNDQVLFIDQGNRPLFEDMTDSDSRDNAPRTIFIISMYADSQPRGMAVTISVKSEKISTLSSENKIISFKEMNPPDNIKDTKSDIIFFQRSVPGHDNKMQFESSSYEGYFLASEKERDLFKLILKKEDELGDRSIMFTVQCEDEPKSSDKTHTCPPCPAPPVAGPSVFLFPPKPKDTLMISRTPEVTCVVVDVKHEDPEVKFNWYVDGVEVHNAKTKPREEEYNSTYRVVSVLTVLHQDWLNGKEYKCKVSNKALPAPIEKTISKAKGQPREPQVYTLPPSREEMTKNQVSLTCDVSGFYPSDIAVEWESDGQPENNYKTTPPVLDSDGSFFLYSKLTVDKSRWEQGDVFSCSVMHEALHNHYTQKSLSLSPG

SEQ ID NO: 1176 - protein, 444 aa, synthetic construct; identical to SEQ ID NO: 386
  source 1..444: note = XENP41093 Chain 2 - SilentFv_H0_Fc(216)_IgG1_PVA_/S267K/S364K/E357Q/H435R/Y436F /K447del

SEQ ID NO: 1177 - protein, 214 aa, synthetic construct; identical to SEQ ID NO: 295
  source 1..214: note = XENP41093 Chain 3 - SilentFv_L0 Light Chain

SEQ ID NO: 1178 - protein, 387 aa, synthetic construct
  source 1..387: note = XENP41094 Chain 1 - human_IL18_4CS_S10C_K53G_N155C_Fc(216)_IgG1_pI(-)_Isosteric _A_C220S/PVA_/S267K/L368D/K370S/K447del
YFGKLESKLCVIRNLNDQVLFIDQGNRPLFEDMTDSDSRDNAPRTIFIISMYGDSQPRGMAVTISVKSEKISTLSSENKIISFKEMNPPDNIKDTKSDIIFFQRSVPGHDNKMQFESSSYEGYFLASEKERDLFKLILKKEDELGDRSIMFTVQCEDEPKSSDKTHTCPPCPAPPVAGPSVFLFPPKPKDTLMISRTPEVTCVVVDVKHEDPEVKFNWYVDGVEVHNAKTKPREEEYNSTYRVVSVLTVLHQDWLNGKEYKCKVSNKALPAPIEKTISKAKGQPREPQVYTLPPSREEMTKNQVSLTCDVSGFYPSDIAVEWESDGQPENNYKTTPPVLDSDGSFFLYSKLTVDKSRWEQGDVFSCSVMHEALHNHYTQKSLSLSPG

SEQ ID NO: 1179 - protein, 444 aa, synthetic construct; identical to SEQ ID NO: 386
  source 1..444: note = XENP41094 Chain 2 - SilentFv_H0_Fc(216)_IgG1_PVA_/S267K/S364K/E357Q/H435R/Y436F /K447del

SEQ ID NO: 1180 - protein, 214 aa, synthetic construct; identical to SEQ ID NO: 295
  source 1..214: note = XENP41094 Chain 3 - SilentFv_L0 Light Chain

SEQ ID NO: 1181 - protein, 387 aa, synthetic construct
  source 1..387: note = XENP41095 Chain 1 - human_IL18_4CS_S10C_K53E_N155C_Fc(216)_IgG1_pI(-)_Isosteric _A_C220S/PVA_/S267K/L368D/K370S/K447del
YFGKLESKLCVIRNLNDQVLFIDQGNRPLFEDMTDSDSRDNAPRTIFIISMYEDSQPRGMAVTISVKSEKISTLSSENKIISFKEMNPPDNIKDTKSDIIFFQRSVPGHDNKMQFESSSYEGYFLASEKERDLFKLILKKEDELGDRSIMFTVQCEDEPKSSDKTHTCPPCPAPPVAGPSVFLFPPKPKDTLMISRTPEVTCVVVDVKHEDPEVKFNWYVDGVEVHNAKTKPREEEYNSTYRVVSVLTVLHQDWLNGKEYKCKVSNKALPAPIEKTISKAKGQPREPQVYTLPPSREEMTKNQVSLTCDVSGFYPSDIAVEWESDGQPENNYKTTPPVLDSDGSFFLYSKLTVDKSRWEQGDVFSCSVMHEALHNHYTQKSLSLSPG

SEQ ID NO: 1182 - protein, 444 aa, synthetic construct; identical to SEQ ID NO: 386
  source 1..444: note = XENP41095 Chain 2 - SilentFv_H0_Fc(216)_IgG1_PVA_/S267K/S364K/E357Q/H435R/Y436F /K447del

SEQ ID NO: 1183 - protein, 214 aa, synthetic construct; identical to SEQ ID NO: 295
  source 1..214: note = XENP41095 Chain 3 - SilentFv_L0 Light Chain

SEQ ID NO: 1184 - protein, 387 aa, synthetic construct
  source 1..387: note = XENP41096 Chain 1 - human_IL18_4CS_S10C_K53S_N155C_Fc(216)_IgG1_pI(-)_Isosteric _A_C220S/PVA_/S267K/L368D/K370S/K447del
YFGKLESKLCVIRNLNDQVLFIDQGNRPLFEDMTDSDSRDNAPRTIFIISMYSDSQPRGMAVTISVKSEKISTLSSENKIISFKEMNPPDNIKDTKSDIIFFQRSVPGHDNKMQFESSSYEGYFLASEKERDLFKLILKKEDELGDRSIMFTVQCEDEPKSSDKTHTCPPCPAPPVAGPSVFLFPPKPKDTLMISRTPEVTCVVVDVKHEDPEVKFNWYVDGVEVHNAKTKPREEEYNSTYRVVSVLTVLHQDWLNGKEYKCKVSNKALPAPIEKTISKAKGQPREPQVYTLPPSREEMTKNQVSLTCDVSGFYPSDIAVEWESDGQPENNYKTTPPVLDSDGSFFLYSKLTVDKSRWEQGDVFSCSVMHEALHNHYTQKSLSLSPG

SEQ ID NO: 1185 - protein, 444 aa, synthetic construct; identical to SEQ ID NO: 386
  source 1..444: note = XENP41096 Chain 2 - SilentFv_H0_Fc(216)_IgG1_PVA_/S267K/S364K/E357Q/H435R/Y436F /K447del

SEQ ID NO: 1186 - protein, 214 aa, synthetic construct; identical to SEQ ID NO: 295
  source 1..214: note = XENP41096 Chain 3 - SilentFv_L0 Light Chain

SEQ ID NO: 1187 - protein, 387 aa, synthetic construct; identical to SEQ ID NO: 309
  source 1..387: note = XENP41353 Chain 1 - human_IL18_4CS_E6Q_Fc(216)_IgG1_pI(-)_Isosteric_A_C220S/PVA _/S267K/L368D/K370S/K447del

SEQ ID NO: 1188 - protein, 444 aa, synthetic construct; identical to SEQ ID NO: 386
  source 1..444: note = XENP41353 Chain 2 - SilentFv_H0_Fc(216)_IgG1_PVA_/S267K/S364K/E357Q/H435R/Y436F /K447del

SEQ ID NO: 1189 - protein, 214 aa, synthetic construct; identical to SEQ ID NO: 295
  source 1..214: note = XENP41353 Chain 3 - SilentFv_L0 Light Chain

SEQ ID NO: 1190 - protein, 387 aa, synthetic construct
  source 1..387: note = XENP41416 Chain 1 - human_IL18_4CS_S10C_M51L_K53D_N155C_Fc(216)_IgG1_pI(-)_Isos teric_A_C220S/PVA_/S267K/L368D/K370S/K447del
YFGKLESKLCVIRNLNDQVLFIDQGNRPLFEDMTDSDSRDNAPRTIFIISLYDDSQPRGMAVTISVKSEKISTLSSENKIISFKEMNPPDNIKDTKSDIIFFQRSVPGHDNKMQFESSSYEGYFLASEKERDLFKLILKKEDELGDRSIMFTVQCEDEPKSSDKTHTCPPCPAPPVAGPSVFLFPPKPKDTLMISRTPEVTCVVVDVKHEDPEVKFNWYVDGVEVHNAKTKPREEEYNSTYRVVSVLTVLHQDWLNGKEYKCKVSNKALPAPIEKTISKAKGQPREPQVYTLPPSREEMTKNQVSLTCDVSGFYPSDIAVEWESDGQPENNYKTTPPVLDSDGSFFLYSKLTVDKSRWEQGDVFSCSVMHEALHNHYTQKSLSLSPG

SEQ ID NO: 1191 - protein, 444 aa, synthetic construct; identical to SEQ ID NO: 386
  source 1..444: note = XENP41416 Chain 2 - SilentFv_H0_Fc(216)_IgG1_PVA_/S267K/S364K/E357Q/H435R/Y436F /K447del

SEQ ID NO: 1192 - protein, 214 aa, synthetic construct; identical to SEQ ID NO: 295
  source 1..214: note = XENP41416 Chain 3 - SilentFv_L0 Light Chain

SEQ ID NO: 1193 - protein, 387 aa, synthetic construct
  source 1..387: note = XENP41417 Chain 1 - human_IL18_4CS_S10C_K53D_D110R_N155C_Fc(216)_IgG1_pI(-)_Iso steric_A_C220S/PVA_/S267K/L368D/K370S/K447del
YFGKLESKLCVIRNLNDQVLFIDQGNRPLFEDMTDSDSRDNAPRTIFIISMYDDSQPRGMAVTISVKSEKISTLSSENKIISFKEMNPPDNIKDTKSDIIFFQRSVPGHRNKMQFESSSYEGYFLASEKERDLFKLILKKEDELGDRSIMFTVQCEDEPKSSDKTHTCPPCPAPPVAGPSVFLFPPKPKDTLMISRTPEVTCVVVDVKHEDPEVKFNWYVDGVEVHNAKTKPREEEYNSTYRVVSVLTVLHQDWLNGKEYKCKVSNKALPAPIEKTISKAKGQPREPQVYTLPPSREEMTKNQVSLTCDVSGFYPSDIAVEWESDGQPENNYKTTPPVLDSDGSFFLYSKLTVDKSRWEQGDVFSCSVMHEALHNHYTQKSLSLSPG

SEQ ID NO: 1194 - protein, 444 aa, synthetic construct; identical to SEQ ID NO: 386
  source 1..444: note = XENP41417 Chain 2 - SilentFv_H0_Fc(216)_IgG1_PVA_/S267K/S364K/E357Q/H435R/Y436F /K447del

SEQ ID NO: 1195 - protein, 214 aa, synthetic construct; identical to SEQ ID NO: 295
  source 1..214: note = XENP41417 Chain 3 - SilentFv_L0 Light Chain

SEQ ID NO: 1196 - protein, 387 aa, synthetic construct; identical to SEQ ID NO: 984
  source 1..387: note = XENP41418 Chain 1 - human_IL18_4CS_S10C_K53D_N111T_N155C_Fc(216)_IgG1_pI(-)_Iso steric_A_C220S/PVA_/S267K/L368D/K370S/K447del

SEQ ID NO: 1197 - protein, 444 aa, synthetic construct; identical to SEQ ID NO: 386
  source 1..444: note = XENP41418 Chain 2 - SilentFv_H0_Fc(216)_IgG1_PVA_/S267K/S364K/E357Q/H435R/Y436F /K447del

SEQ ID NO: 1198 - protein, 214 aa, synthetic construct; identical to SEQ ID NO: 295
  source 1..214: note = XENP41418 Chain 3 - SilentFv_L0 Light Chain

SEQ ID NO: 1199 - protein, 387 aa, synthetic construct; identical to SEQ ID NO: 986
  source 1..387: note = XENP41419 Chain 1 - human_IL18_4CS_S10C_K53D_S55T_N155C_Fc(216)_IgG1_pI(-)_Isos teric_A_C220S/PVA_/S267K/L368D/K370S/K447del

SEQ ID NO: 1200 - protein, 444 aa, synthetic construct; identical to SEQ ID NO: 386
  source 1..444: note = XENP41419 Chain 2 - SilentFv_H0_Fc(216)_IgG1_PVA_/S267K/S364K/E357Q/H435R/Y436F /K447del

SEQ ID NO: 1201 - protein, 214 aa, synthetic construct; identical to SEQ ID NO: 295
  source 1..214: note = XENP41419 Chain 3 - SilentFv_L0 Light Chain

SEQ ID NO: 1202 - protein, 387 aa, synthetic construct
  source 1..387: note = XENP41420 Chain 1 - human_IL18_4CS_S10C_K53D_S55T_D110R_N155C_Fc(216)_IgG1_pI(- )_Isosteric_A_C220S/PVA_/S267K/L368D/K370S/K447del
YFGKLESKLCVIRNLNDQVLFIDQGNRPLFEDMTDSDSRDNAPRTIFIISMYDDTQPRGMAVTISVKSEKISTLSSENKIISFKEMNPPDNIKDTKSDIIFFQRSVPGHRNKMQFESSSYEGYFLASEKERDLFKLILKKEDELGDRSIMFTVQCEDEPKSSDKTHTCPPCPAPPVAGPSVFLFPPKPKDTLMISRTPEVTCVVVDVKHEDPEVKFNWYVDGVEVHNAKTKPREEEYNSTYRVVSVLTVLHQDWLNGKEYKCKVSNKALPAPIEKTISKAKGQPREPQVYTLPPSREEMTKNQVSLTCDVSGFYPSDIAVEWESDGQPENNYKTTPPVLDSDGSFFLYSKLTVDKSRWEQGDVFSCSVMHEALHNHYTQKSLSLSPG

SEQ ID NO: 1203 - protein, 444 aa, synthetic construct; identical to SEQ ID NO: 386
  source 1..444: note = XENP41420 Chain 2 - SilentFv_H0_Fc(216)_IgG1_PVA_/S267K/S364K/E357Q/H435R/Y436F /K447del

SEQ ID NO: 1204 - protein, 214 aa, synthetic construct; identical to SEQ ID NO: 295
  source 1..214: note = XENP41420 Chain 3 - SilentFv_L0 Light Chain

SEQ ID NO: 1205 - protein, 387 aa, synthetic construct; identical to SEQ ID NO: 978
  source 1..387: note = XENP41421 Chain 1 - human_IL18_4CS_S10C_M51L_K53D_S55T_D110R_N111T_N155C_Fc(216 )_IgG1_pI(-)_Isosteric_A_C220S/PVA_/S267K/L368D/K370S/K447d el

SEQ ID NO: 1206 - protein, 444 aa, synthetic construct; identical to SEQ ID NO: 386
  source 1..444: note = XENP41421 Chain 2 - SilentFv_H0_Fc(216)_IgG1_PVA_/S267K/S364K/E357Q/H435R/Y436F /K447del

SEQ ID NO: 1207 - protein, 214 aa, synthetic construct; identical to SEQ ID NO: 295
  source 1..214: note = XENP41421 Chain 3 - SilentFv_L0 Light Chain

SEQ ID NO: 1208 - protein, 387 aa, synthetic construct
  source 1..387: note = XENP41422 Chain 1 - human_IL18_4CS_S10C_M51L_K53D_S55T_D110R_N155C_Fc(216)_IgG1 _pI(-)_Isosteric_A_C220S/PVA_/S267K/L368D/K370S/K447del
YFGKLESKLCVIRNLNDQVLFIDQGNRPLFEDMTDSDSRDNAPRTIFIISLYDDTQPRGMAVTISVKSEKISTLSSENKIISFKEMNPPDNIKDTKSDIIFFQRSVPGHRNKMQFESSSYEGYFLASEKERDLFKLILKKEDELGDRSIMFTVQCEDEPKSSDKTHTCPPCPAPPVAGPSVFLFPPKPKDTLMISRTPEVTCVVVDVKHEDPEVKFNWYVDGVEVHNAKTKPREEEYNSTYRVVSVLTVLHQDWLNGKEYKCKVSNKALPAPIEKTISKAKGQPREPQVYTLPPSREEMTKNQVSLTCDVSGFYPSDIAVEWESDGQPENNYKTTPPVLDSDGSFFLYSKLTVDKSRWEQGDVFSCSVMHEALHNHYTQKSLSLSPG

SEQ ID NO: 1209 - protein, 444 aa, synthetic construct; identical to SEQ ID NO: 386
  source 1..444: note = XENP41422 Chain 2 - SilentFv_H0_Fc(216)_IgG1_PVA_/S267K/S364K/E357Q/H435R/Y436F /K447del

SEQ ID NO: 1210 - protein, 214 aa, synthetic construct; identical to SEQ ID NO: 295
  source 1..214: note = XENP41422 Chain 3 - SilentFv_L0 Light Chain

SEQ ID NO: 1211 - protein, 387 aa, synthetic construct; identical to SEQ ID NO: 980
  source 1..387: note = XENP41423 Chain 1 - human_IL18_4CS_S10C_K53D_S55T_D110R_N111T_N155C_Fc(216)_IgG 1_pI(-)_Isosteric_A_C220S/PVA_/S267K/L368D/K370S/K447del

SEQ ID NO: 1212 - protein, 444 aa, synthetic construct; identical to SEQ ID NO: 386
  source 1..444: note = XENP41423 Chain 2 - SilentFv_H0_Fc(216)_IgG1_PVA_/S267K/S364K/E357Q/H435R/Y436F /K447del

SEQ ID NO: 1213 - protein, 214 aa, synthetic construct; identical to SEQ ID NO: 295
  source 1..214: note = XENP41423 Chain 3 - SilentFv_L0 Light Chain

SEQ ID NO: 1214 - protein, 387 aa, synthetic construct; identical to SEQ ID NO: 982
  source 1..387: note = XENP41424 Chain 1 - human_IL18_4CS_S10C_K53D_S55T_N111T_N155C_Fc(216)_IgG1_pI(- )_Isosteric_A_C220S/PVA_/S267K/L368D/K370S/K447del

SEQ ID NO: 1215 - protein, 444 aa, synthetic construct; identical to SEQ ID NO: 386
  source 1..444: note = XENP41424 Chain 2 - SilentFv_H0_Fc(216)_IgG1_PVA_/S267K/S364K/E357Q/H435R/Y436F /K447del

SEQ ID NO: 1216 - protein, 214 aa, synthetic construct; identical to SEQ ID NO: 295
  source 1..214: note = XENP41424 Chain 3 - SilentFv_L0 Light Chain

SEQ ID NO: 1217 - protein, 387 aa, synthetic construct; identical to SEQ ID NO: 1004
  source 1..387: note = XENP41425 Chain 1 - human_IL18_4CS_S10C_E31Q_D35N_N155C_Fc(216)_IgG1_pI(-)_Isos teric_A_C220S/PVA_/S267K/L368D/K370S/K447del

SEQ ID NO: 1218 - protein, 444 aa, synthetic construct; identical to SEQ ID NO: 386
  source 1..444: note = XENP41425 Chain 2 - SilentFv_H0_Fc(216)_IgG1_PVA_/S267K/S364K/E357Q/H435R/Y436F /K447del

SEQ ID NO: 1219 - protein, 214 aa, synthetic construct; identical to SEQ ID NO: 295
  source 1..214: note = XENP41425 Chain 3 - SilentFv_L0 Light Chain

SEQ ID NO: 1220 - protein, 387 aa, synthetic construct
  source 1..387: note = XENP41426 Chain 1 - human_IL18_4CS_S10C_N41Q_N155C_Fc(216)_IgG1_pI(-)_Isosteric _A_C220S/PVA_/S267K/L368D/K370S/K447del
YFGKLESKLCVIRNLNDQVLFIDQGNRPLFEDMTDSDSRDQAPRTIFIISMYKDSQPRGMAVTISVKSEKISTLSSENKIISFKEMNPPDNIKDTKSDIIFFQRSVPGHDNKMQFESSSYEGYFLASEKERDLFKLILKKEDELGDRSIMFTVQCEDEPKSSDKTHTCPPCPAPPVAGPSVFLFPPKPKDTLMISRTPEVTCVVVDVKHEDPEVKFNWYVDGVEVHNAKTKPREEEYNSTYRVVSVLTVLHQDWLNGKEYKCKVSNKALPAPIEKTISKAKGQPREPQVYTLPPSREEMTKNQVSLTCDVSGFYPSDIAVEWESDGQPENNYKTTPPVLDSDGSFFLYSKLTVDKSRWEQGDVFSCSVMHEALHNHYTQKSLSLSPG

SEQ ID NO: 1221 - protein, 444 aa, synthetic construct; identical to SEQ ID NO: 386
  source 1..444: note = XENP41426 Chain 2 - SilentFv_H0_Fc(216)_IgG1_PVA_/S267K/S364K/E357Q/H435R/Y436F /K447del

SEQ ID NO: 1222 - protein, 214 aa, synthetic construct; identical to SEQ ID NO: 295
  source 1..214: note = XENP41426 Chain 3 - SilentFv_L0 Light Chain

SEQ ID NO: 1223 - protein, 387 aa, synthetic construct
  source 1..387: note = XENP41427 Chain 1 - human_IL18_4CS_S10C_D35N_N155C_Fc(216)_IgG1_pI(-)_Isosteric _A_C220S/PVA_/S267K/L368D/K370S/K447del
YFGKLESKLCVIRNLNDQVLFIDQGNRPLFEDMTNSDSRDNAPRTIFIISMYKDSQPRGMAVTISVKSEKISTLSSENKIISFKEMNPPDNIKDTKSDIIFFQRSVPGHDNKMQFESSSYEGYFLASEKERDLFKLILKKEDELGDRSIMFTVQCEDEPKSSDKTHTCPPCPAPPVAGPSVFLFPPKPKDTLMISRTPEVTCVVVDVKHEDPEVKFNWYVDGVEVHNAKTKPREEEYNSTYRVVSVLTVLHQDWLNGKEYKCKVSNKALPAPIEKTISKAKGQPREPQVYTLPPSREEMTKNQVSLTCDVSGFYPSDIAVEWESDGQPENNYKTTPPVLDSDGSFFLYSKLTVDKSRWEQGDVFSCSVMHEALHNHYTQKSLSLSPG

SEQ ID NO: 1224 - protein, 444 aa, synthetic construct; identical to SEQ ID NO: 386
  source 1..444: note = XENP41427 Chain 2 - SilentFv_H0_Fc(216)_IgG1_PVA_/S267K/S364K/E357Q/H435R/Y436F /K447del

SEQ ID NO: 1225 - protein, 214 aa, synthetic construct; identical to SEQ ID NO: 295
  source 1..214: note = XENP41427 Chain 3 - SilentFv_L0 Light Chain

SEQ ID NO: 1226 - protein, 387 aa, synthetic construct
  source 1..387: note = XENP41428 Chain 1 - human_IL18_4CS_S10C_D37N_N155C_Fc(216)_IgG1_pI(-)_Isosteric _A_C220S/PVA_/S267K/L368D/K370S/K447del
YFGKLESKLCVIRNLNDQVLFIDQGNRPLFEDMTDSNSRDNAPRTIFIISMYKDSQPRGMAVTISVKSEKISTLSSENKIISFKEMNPPDNIKDTKSDIIFFQRSVPGHDNKMQFESSSYEGYFLASEKERDLFKLILKKEDELGDRSIMFTVQCEDEPKSSDKTHTCPPCPAPPVAGPSVFLFPPKPKDTLMISRTPEVTCVVVDVKHEDPEVKFNWYVDGVEVHNAKTKPREEEYNSTYRVVSVLTVLHQDWLNGKEYKCKVSNKALPAPIEKTISKAKGQPREPQVYTLPPSREEMTKNQVSLTCDVSGFYPSDIAVEWESDGQPENNYKTTPPVLDSDGSFFLYSKLTVDKSRWEQGDVFSCSVMHEALHNHYTQKSLSLSPG

SEQ ID NO: 1227 - protein, 444 aa, synthetic construct; identical to SEQ ID NO: 386
  source 1..444: note = XENP41428 Chain 2 - SilentFv_H0_Fc(216)_IgG1_PVA_/S267K/S364K/E357Q/H435R/Y436F /K447del

SEQ ID NO: 1228 - protein, 214 aa, synthetic construct; identical to SEQ ID NO: 295
  source 1..214: note = XENP41428 Chain 3 - SilentFv_L0 Light Chain

SEQ ID NO: 1229 - protein, 387 aa, synthetic construct; identical to SEQ ID NO: 1000
  source 1..387: note = XENP41429 Chain 1 - human_IL18_4CS_S10C_E31Q_D37N_N155C_Fc(216)_IgG1_pI(-)_Isos teric_A_C220S/PVA_/S267K/L368D/K370S/K447del

SEQ ID NO: 1230 - protein, 444 aa, synthetic construct; identical to SEQ ID NO: 386
  source 1..444: note = XENP41429 Chain 2 - SilentFv_H0_Fc(216)_IgG1_PVA_/S267K/S364K/E357Q/H435R/Y436F /K447del

SEQ ID NO: 1231 - protein, 214 aa, synthetic construct; identical to SEQ ID NO: 295
  source 1..214: note = XENP41429 Chain 3 - SilentFv_L0 Light Chain

SEQ ID NO: 1232 - protein, 387 aa, synthetic construct; identical to SEQ ID NO: 998
  source 1..387: note = XENP41430 Chain 1 - human_IL18_4CS_S10C_D35N_D37N_N155C_Fc(216)_IgG1_pI(-)_Isos teric_A_C220S/PVA_/S267K/L368D/K370S/K447del

SEQ ID NO: 1233 - protein, 444 aa, synthetic construct; identical to SEQ ID NO: 386
  source 1..444: note = XENP41430 Chain 2 - SilentFv_H0_Fc(216)_IgG1_PVA_/S267K/S364K/E357Q/H435R/Y436F /K447del

SEQ ID NO: 1234 - protein, 214 aa, synthetic construct; identical to SEQ ID NO: 295
  source 1..214: note = XENP41430 Chain 3 - SilentFv_L0 Light Chain

SEQ ID NO: 1235 - protein, 387 aa, synthetic construct; identical to SEQ ID NO: 962
  source 1..387: note = XENP41431 Chain 1 - human_IL18_4CS_E6Q_S10C_K53D_N155C_Fc(216)_IgG1_pI(-)_Isost eric_A_C220S/PVA_/S267K/L368D/K370S/K447del

SEQ ID NO: 1236 - protein, 444 aa, synthetic construct; identical to SEQ ID NO: 386
  source 1..444: note = XENP41431 Chain 2 - SilentFv_H0_Fc(216)_IgG1_PVA_/S267K/S364K/E357Q/H435R/Y436F /K447del

SEQ ID NO: 1237 - protein, 214 aa, synthetic construct; identical to SEQ ID NO: 295
  source 1..214: note = XENP41431 Chain 3 - SilentFv_L0 Light Chain

SEQ ID NO: 1238 - protein, 387 aa, synthetic construct
  source 1..387: note = XENP41440 Chain 1 - human_IL18_4CS_E6Q_S10C_M51L_K53D_S55T_D110R_N111T_N155C_Fc (216)_IgG1_pI(-)_Isosteric_A_C220S/PVA_/S267K/L368D/K370S/K 447del
YFGKLQSKLCVIRNLNDQVLFIDQGNRPLFEDMTDSDSRDNAPRTIFIISLYDDTQPRGMAVTISVKSEKISTLSSENKIISFKEMNPPDNIKDTKSDIIFFQRSVPGHRTKMQFESSSYEGYFLASEKERDLFKLILKKEDELGDRSIMFTVQCEDEPKSSDKTHTCPPCPAPPVAGPSVFLFPPKPKDTLMISRTPEVTCVVVDVKHEDPEVKFNWYVDGVEVHNAKTKPREEEYNSTYRVVSVLTVLHQDWLNGKEYKCKVSNKALPAPIEKTISKAKGQPREPQVYTLPPSREEMTKNQVSLTCDVSGFYPSDIAVEWESDGQPENNYKTTPPVLDSDGSFFLYSKLTVDKSRWEQGDVFSCSVMHEALHNHYTQKSLSLSPG

SEQ ID NO: 1239 - protein, 444 aa, synthetic construct; identical to SEQ ID NO: 386
  source 1..444: note = XENP41440 Chain 2 - SilentFv_H0_Fc(216)_IgG1_PVA_/S267K/S364K/E357Q/H435R/Y436F /K447del

SEQ ID NO: 1240 - protein, 214 aa, synthetic construct; identical to SEQ ID NO: 295
  source 1..214: note = XENP41440 Chain 3 - SilentFv_L0 Light Chain

SEQ ID NO: 1241 - protein, 387 aa, synthetic construct
  source 1..387: note = XENP41513 Chain 1 - human_IL18_4CS_S10C_K53D_H109Y_N155C_Fc(216)_IgG1_pI(-)_Iso steric_A_C220S/PVA_/S267K/L368D/K370S/K447del
YFGKLESKLCVIRNLNDQVLFIDQGNRPLFEDMTDSDSRDNAPRTIFIISMYDDSQPRGMAVTISVKSEKISTLSSENKIISFKEMNPPDNIKDTKSDIIFFQRSVPGYDNKMQFESSSYEGYFLASEKERDLFKLILKKEDELGDRSIMFTVQCEDEPKSSDKTHTCPPCPAPPVAGPSVFLFPPKPKDTLMISRTPEVTCVVVDVKHEDPEVKFNWYVDGVEVHNAKTKPREEEYNSTYRVVSVLTVLHQDWLNGKEYKCKVSNKALPAPIEKTISKAKGQPREPQVYTLPPSREEMTKNQVSLTCDVSGFYPSDIAVEWESDGQPENNYKTTPPVLDSDGSFFLYSKLTVDKSRWEQGDVFSCSVMHEALHNHYTQKSLSLSPG

SEQ ID NO: 1242 - protein, 444 aa, synthetic construct; identical to SEQ ID NO: 386
  source 1..444: note = XENP41513 Chain 2 - SilentFv_H0_Fc(216)_IgG1_PVA_/S267K/S364K/E357Q/H435R/Y436F /K447del

SEQ ID NO: 1243 - protein, 214 aa, synthetic construct; identical to SEQ ID NO: 295
  source 1..214: note = XENP41513 Chain 3 - SilentFv_L0 Light Chain

SEQ ID NO: 1244 - protein, 387 aa, synthetic construct; identical to SEQ ID NO: 990
  source 1..387: note = XENP41514 Chain 1 - human_IL18_4CS_S10C_D37N_K53D_N155C_Fc(216)_IgG1_pI(-)_Isos teric_A_C220S/PVA_/S267K/L368D/K370S/K447del

SEQ ID NO: 1245 - protein, 444 aa, synthetic construct; identical to SEQ ID NO: 386
  source 1..444: note = XENP41514 Chain 2 - SilentFv_H0_Fc(216)_IgG1_PVA_/S267K/S364K/E357Q/H435R/Y436F /K447del

SEQ ID NO: 1246 - protein, 214 aa, synthetic construct; identical to SEQ ID NO: 295
  source 1..214: note = XENP41514 Chain 3 - SilentFv_L0 Light Chain

SEQ ID NO: 1247 - protein, 387 aa, synthetic construct; identical to SEQ ID NO: 992
  source 1..387: note = XENP41515 Chain 1 - human_IL18_4CS_S10C_D35N_K53D_N155C_Fc(216)_IgG1_pI(-)_Isos teric_A_C220S/PVA_/S267K/L368D/K370S/K447del

SEQ ID NO: 1248 - protein, 444 aa, synthetic construct; identical to SEQ ID NO: 386
  source 1..444: note = XENP41515 Chain 2 - SilentFv_H0_Fc(216)_IgG1_PVA_/S267K/S364K/E357Q/H435R/Y436F /K447del

SEQ ID NO: 1249 - protein, 214 aa, synthetic construct; identical to SEQ ID NO: 295
  source 1..214: note = XENP41515 Chain 3 - SilentFv_L0 Light Chain

SEQ ID NO: 1250 - protein, 387 aa, synthetic construct
  source 1..387: note = XENP41516 Chain 1 - human_IL18_4CS_K8E_S10C_K53D_N155C_Fc(216)_IgG1_pI(-)_Isost eric_A_C220S/PVA_/S267K/L368D/K370S/K447del
YFGKLESELCVIRNLNDQVLFIDQGNRPLFEDMTDSDSRDNAPRTIFIISMYDDSQPRGMAVTISVKSEKISTLSSENKIISFKEMNPPDNIKDTKSDIIFFQRSVPGHDNKMQFESSSYEGYFLASEKERDLFKLILKKEDELGDRSIMFTVQCEDEPKSSDKTHTCPPCPAPPVAGPSVFLFPPKPKDTLMISRTPEVTCVVVDVKHEDPEVKFNWYVDGVEVHNAKTKPREEEYNSTYRVVSVLTVLHQDWLNGKEYKCKVSNKALPAPIEKTISKAKGQPREPQVYTLPPSREEMTKNQVSLTCDVSGFYPSDIAVEWESDGQPENNYKTTPPVLDSDGSFFLYSKLTVDKSRWEQGDVFSCSVMHEALHNHYTQKSLSLSPG

SEQ ID NO: 1251 - protein, 444 aa, synthetic construct; identical to SEQ ID NO: 386
  source 1..444: note = XENP41516 Chain 2 - SilentFv_H0_Fc(216)_IgG1_PVA_/S267K/S364K/E357Q/H435R/Y436F /K447del

SEQ ID NO: 1252 - protein, 214 aa, synthetic construct; identical to SEQ ID NO: 295
  source 1..214: note = XENP41516 Chain 3 - SilentFv_L0 Light Chain

SEQ ID NO: 1253 - protein, 387 aa, synthetic construct; identical to SEQ ID NO: 994
  source 1..387: note = XENP41517 Chain 1 - human_IL18_4CS_S10C_E31Q_K53D_N155C_Fc(216)_IgG1_pI(-)_Isos teric_A_C220S/PVA_/S267K/L368D/K370S/K447del

SEQ ID NO: 1254 - protein, 444 aa, synthetic construct; identical to SEQ ID NO: 386
  source 1..444: note = XENP41517 Chain 2 - SilentFv_H0_Fc(216)_IgG1_PVA_/S267K/S364K/E357Q/H435R/Y436F /K447del

SEQ ID NO: 1255 - protein, 214 aa, synthetic construct; identical to SEQ ID NO: 295
  source 1..214: note = XENP41517 Chain 3 - SilentFv_L0 Light Chain

SEQ ID NO: 1256 - protein, 387 aa, synthetic construct; identical to SEQ ID NO: 996
  source 1..387: note = XENP41518 Chain 1 - human_IL18_4CS_S10C_N41Q_K53D_N155C_Fc(216)_IgG1_pI(-)_Isos teric_A_C220S/PVA_/S267K/L368D/K370S/K447del

SEQ ID NO: 1257 - protein, 444 aa, synthetic construct; identical to SEQ ID NO: 386
  source 1..444: note = XENP41518 Chain 2 - SilentFv_H0_Fc(216)_IgG1_PVA_/S267K/S364K/E357Q/H435R/Y436F /K447del

SEQ ID NO: 1258 - protein, 214 aa, synthetic construct; identical to SEQ ID NO: 295
  source 1..214: note = XENP41518 Chain 3 - SilentFv_L0 Light Chain

SEQ ID NO: 1259 - protein, 387 aa, synthetic construct
  source 1..387: note = XENP41519 Chain 1 - human_IL18_4CS_S10C_K53D_P57V_N155C_Fc(216)_IgG1_pI(-)_Isos teric_A_C220S/PVA_/S267K/L368D/K370S/K447del
YFGKLESKLCVIRNLNDQVLFIDQGNRPLFEDMTDSDSRDNAPRTIFIISMYDDSQVRGMAVTISVKSEKISTLSSENKIISFKEMNPPDNIKDTKSDIIFFQRSVPGHDNKMQFESSSYEGYFLASEKERDLFKLILKKEDELGDRSIMFTVQCEDEPKSSDKTHTCPPCPAPPVAGPSVFLFPPKPKDTLMISRTPEVTCVVVDVKHEDPEVKFNWYVDGVEVHNAKTKPREEEYNSTYRVVSVLTVLHQDWLNGKEYKCKVSNKALPAPIEKTISKAKGQPREPQVYTLPPSREEMTKNQVSLTCDVSGFYPSDIAVEWESDGQPENNYKTTPPVLDSDGSFFLYSKLTVDKSRWEQGDVFSCSVMHEALHNHYTQKSLSLSPG

SEQ ID NO: 1260 - protein, 444 aa, synthetic construct; identical to SEQ ID NO: 386
  source 1..444: note = XENP41519 Chain 2 - SilentFv_H0_Fc(216)_IgG1_PVA_/S267K/S364K/E357Q/H435R/Y436F /K447del

SEQ ID NO: 1261 - protein, 214 aa, synthetic construct; identical to SEQ ID NO: 295
  source 1..214: note = XENP41519 Chain 3 - SilentFv_L0 Light Chain

SEQ ID NO: 1262 - protein, 387 aa, synthetic construct
  source 1..387: note = XENP41520 Chain 1 - human_IL18_4CS_S10C_K53D_P57T_N155C_Fc(216)_IgG1_pI(-)_Isos teric_A_C220S/PVA_/S267K/L368D/K370S/K447del
YFGKLESKLCVIRNLNDQVLFIDQGNRPLFEDMTDSDSRDNAPRTIFIISMYDDSQTRGMAVTISVKSEKISTLSSENKIISFKEMNPPDNIKDTKSDIIFFQRSVPGHDNKMQFESSSYEGYFLASEKERDLFKLILKKEDELGDRSIMFTVQCEDEPKSSDKTHTCPPCPAPPVAGPSVFLFPPKPKDTLMISRTPEVTCVVVDVKHEDPEVKFNWYVDGVEVHNAKTKPREEEYNSTYRVVSVLTVLHQDWLNGKEYKCKVSNKALPAPIEKTISKAKGQPREPQVYTLPPSREEMTKNQVSLTCDVSGFYPSDIAVEWESDGQPENNYKTTPPVLDSDGSFFLYSKLTVDKSRWEQGDVFSCSVMHEALHNHYTQKSLSLSPG

SEQ ID NO: 1263 - protein, 444 aa, synthetic construct; identical to SEQ ID NO: 386
  source 1..444: note = XENP41520 Chain 2 - SilentFv_H0_Fc(216)_IgG1_PVA_/S267K/S364K/E357Q/H435R/Y436F /K447del

SEQ ID NO: 1264 - protein, 214 aa, synthetic construct; identical to SEQ ID NO: 295
  source 1..214: note = XENP41520 Chain 3 - SilentFv_L0 Light Chain

SEQ ID NO: 1265 - protein, 156 aa, synthetic construct
  source 1..156: note = human_IL18_4CS_E31Q_I80T_I81L_delD193
YFGKLESKLSVIRNLNDQVLFIDQGNRPLFQDMTDSDSRDNAPRTIFIISMYKDSQPRGMAVTISVKSEKISTLSSENKTLSFKEMNPPDNIKDTKSDIIFFQRSVPGHDNKMQFESSSYEGYFLASEKERDLFKLILKKEDELGDRSIMFTVQNE

SEQ ID NO: 1266 - protein, 156 aa, synthetic construct
  source 1..156: note = human_IL18_4CS_E31Q_P57A_S119L_delD193
YFGKLESKLSVIRNLNDQVLFIDQGNRPLFQDMTDSDSRDNAPRTIFIISMYKDSQARGMAVTISVKSEKISTLSSENKIISFKEMNPPDNIKDTKSDIIFFQRSVPGHDNKMQFESSLYEGYFLASEKERDLFKLILKKEDELGDRSIMFTVQNE

SEQ ID NO: 1267 - protein, 156 aa, synthetic construct
  source 1..156: note = human_IL18_4CS_E31Q_P57A_I80T_I81L_S119L_delD193
YFGKLESKLSVIRNLNDQVLFIDQGNRPLFQDMTDSDSRDNAPRTIFIISMYKDSQARGMAVTISVKSEKISTLSSENKTLSFKEMNPPDNIKDTKSDIIFFQRSVPGHDNKMQFESSLYEGYFLASEKERDLFKLILKKEDELGDRSIMFTVQNE

SEQ ID NO: 1268 - protein, 156 aa, synthetic construct
  source 1..156: note = human_IL18_4CS_E31Q_P57A_K93D_T95E_S119L_delD193
YFGKLESKLSVIRNLNDQVLFIDQGNRPLFQDMTDSDSRDNAPRTIFIISMYKDSQARGMAVTISVKSEKISTLSSENKIISFKEMNPPDNIDDEKSDIIFFQRSVPGHDNKMQFESSLYEGYFLASEKERDLFKLILKKEDELGDRSIMFTVQNE

SEQ ID NO: 1269 - protein, 156 aa, synthetic construct
  source 1..156: note = human_IL18_4CS_E31Q_I80T_S119L_delD193
YFGKLESKLSVIRNLNDQVLFIDQGNRPLFQDMTDSDSRDNAPRTIFIISMYKDSQPRGMAVTISVKSEKISTLSSENKTISFKEMNPPDNIKDTKSDIIFFQRSVPGHDNKMQFESSLYEGYFLASEKERDLFKLILKKEDELGDRSIMFTVQNE

SEQ ID NO: 1270 - protein, 156 aa, synthetic construct
  source 1..156: note = human_IL18_4CS_E31Q_I80T_I81L_K93D_T95E_delD193
YFGKLESKLSVIRNLNDQVLFIDQGNRPLFQDMTDSDSRDNAPRTIFIISMYKDSQPRGMAVTISVKSEKISTLSSENKTLSFKEMNPPDNIDDEKSDIIFFQRSVPGHDNKMQFESSSYEGYFLASEKERDLFKLILKKEDELGDRSIMFTVQNE

SEQ ID NO: 1271 - protein, 156 aa, synthetic construct
  source 1..156: note human_IL18_4CS_E31Q_P57A_I80T_I81L_K93D_T95E_S119L_delD193
YFGKLESKLSVIRNLNDQVLFIDQGNRPLFQDMTDSDSRDNAPRTIFIISMYKDSQARGMAVTISVKSEKISTLSSENKTLSFKEMNPPDNIDDEKSDIIFFQRSVPGHDNKMQFESSLYEGYFLASEKERDLFKLILKKEDELGDRSIMFTVQNE

SEQ ID NO: 1272 - protein, 156 aa, synthetic construct
  source 1..156: note = human_IL18_4CS_S7C_E31Q_S50C_delD193
YFGKLECKLSVIRNLNDQVLFIDQGNRPLFQDMTDSDSRDNAPRTIFIICMYKDSQPRGMAVTISVKSEKISTLSSENKIISFKEMNPPDNIKDTKSDIIFFQRSVPGHDNKMQFESSSYEGYFLASEKERDLFKLILKKEDELGDRSIMFTVQNE

SEQ ID NO: 1273 - protein, 156 aa, synthetic construct
  source 1..156: note = human_IL18_4CS_S7C_E31Q_S50C_P57A_delD193
YFGKLECKLSVIRNLNDQVLFIDQGNRPLFQDMTDSDSRDNAPRTIFIICMYKDSQARGMAVTISVKSEKISTLSSENKIISFKEMNPPDNIKDTKSDIIFFQRSVPGHDNKMQFESSSYEGYFLASEKERDLFKLILKKEDELGDRSIMFTVQNE

SEQ ID NO: 1274 - protein, 156 aa, synthetic construct
  source 1..156: note = human_IL18_4CS_S7C_E31Q_S50C_S119L_delD193
YFGKLECKLSVIRNLNDQVLFIDQGNRPLFQDMTDSDSRDNAPRTIFIICMYKDSQPRGMAVTISVKSEKISTLSSENKIISFKEMNPPDNIKDTKSDIIFFQRSVPGHDNKMQFESSLYEGYFLASEKERDLFKLILKKEDELGDRSIMFTVQNE

SEQ ID NO: 1275 - protein, 156 aa, synthetic construct
  source 1..156: note = human_IL18_4CS_S7C_E31Q_S50C_I80T_delD193
YFGKLECKLSVIRNLNDQVLFIDQGNRPLFQDMTDSDSRDNAPRTIFIICMYKDSQPRGMAVTISVKSEKISTLSSENKTISFKEMNPPDNIKDTKSDIIFFQRSVPGHDNKMQFESSSYEGYFLASEKERDLFKLILKKEDELGDRSIMFTVQNE

SEQ ID NO: 1276 - protein, 156 aa, synthetic construct
  source 1..156: note = human_IL18_4CS_S7C_E31Q_S50C_I80T_S119L_delD193
YFGKLECKLSVIRNLNDQVLFIDQGNRPLFQDMTDSDSRDNAPRTIFIICMYKDSQPRGMAVTISVKSEKISTLSSENKTISFKEMNPPDNIKDTKSDIIFFQRSVPGHDNKMQFESSLYEGYFLASEKERDLFKLILKKEDELGDRSIMFTVQNE

SEQ ID NO: 1277 - protein, 156 aa, synthetic construct
  source 1..156: note = human_IL18_4CS_S7C_E31Q_S50C_P57A_I80T_S119L_delD193
YFGKLECKLSVIRNLNDQVLFIDQGNRPLFQDMTDSDSRDNAPRTIFIICMYKDSQARGMAVTISVKSEKISTLSSENKTISFKEMNPPDNIKDTKSDIIFFQRSVPGHDNKMQFESSLYEGYFLASEKERDLFKLILKKEDELGDRSIMFTVQNE

SEQ ID NO: 1278 - protein, 156 aa, synthetic construct
  source 1..156: note = human_IL18_4CS_S10C_E31Q_N155C_delD193
YFGKLESKLCVIRNLNDQVLFIDQGNRPLFQDMTDSDSRDNAPRTIFIISMYKDSQPRGMAVTISVKSEKISTLSSENKIISFKEMNPPDNIKDTKSDIIFFQRSVPGHDNKMQFESSSYEGYFLASEKERDLFKLILKKEDELGDRSIMFTVQCE

SEQ ID NO: 1279 - protein, 156 aa, synthetic construct
  source 1..156: note = human_IL18_4CS_S10C_E31Q_P57A_N155C_delD193
YFGKLESKLCVIRNLNDQVLFIDQGNRPLFQDMTDSDSRDNAPRTIFIISMYKDSQARGMAVTISVKSEKISTLSSENKIISFKEMNPPDNIKDTKSDIIFFQRSVPGHDNKMQFESSSYEGYFLASEKERDLFKLILKKEDELGDRSIMFTVQCE

SEQ ID NO: 1280 - protein, 156 aa, synthetic construct
  source 1..156: note = human_IL18_4CS_S10C_E31Q_S119L_N155C_delD193
YFGKLESKLCVIRNLNDQVLFIDQGNRPLFQDMTDSDSRDNAPRTIFIISMYKDSQPRGMAVTISVKSEKISTLSSENKIISFKEMNPPDNIKDTKSDIIFFQRSVPGHDNKMQFESSLYEGYFLASEKERDLFKLILKKEDELGDRSIMFTVQCE

SEQ ID NO: 1281 - protein, 156 aa, synthetic construct
  source 1..156: note = human_IL18_4CS_S10C_E31Q_I80T_N155C_delD193
YFGKLESKLCVIRNLNDQVLFIDQGNRPLFQDMTDSDSRDNAPRTIFIISMYKDSQPRGMAVTISVKSEKISTLSSENKTISFKEMNPPDNIKDTKSDIIFFQRSVPGHDNKMQFESSSYEGYFLASEKERDLFKLILKKEDELGDRSIMFTVQCE

SEQ ID NO: 1282 - protein, 156 aa, synthetic construct
  source 1..156: note = human_IL18_4CS_S10C_E31Q_I80T_S119L_N155C_delD193
YFGKLESKLCVIRNLNDQVLFIDQGNRPLFQDMTDSDSRDNAPRTIFIISMYKDSQPRGMAVTISVKSEKISTLSSENKTISFKEMNPPDNIKDTKSDIIFFQRSVPGHDNKMQFESSLYEGYFLASEKERDLFKLILKKEDELGDRSIMFTVQCE

SEQ ID NO: 1283 - protein, 156 aa, synthetic construct
  source 1..156: note human_IL18_4CS_S10C_E31Q_P57A_I80T_S119L_N155C_delD193
YFGKLESKLCVIRNLNDQVLFIDQGNRPLFQDMTDSDSRDNAPRTIFIISMYKDSQARGMAVTISVKSEKISTLSSENKTISFKEMNPPDNIKDTKSDIIFFQRSVPGHDNKMQFESSLYEGYFLASEKERDLFKLILKKEDELGDRSIMFTVQCE

SEQ ID NO: 1284 - protein, 156 aa, synthetic construct
  source 1..156: note = human_IL18_4CS_S10C_E31Q_I49C_delD193
YFGKLESKLCVIRNLNDQVLFIDQGNRPLFQDMTDSDSRDNAPRTIFICSMYKDSQPRGMAVTISVKSEKISTLSSENKIISFKEMNPPDNIKDTKSDIIFFQRSVPGHDNKMQFESSSYEGYFLASEKERDLFKLILKKEDELGDRSIMFTVQNE

SEQ ID NO: 1285 - protein, 156 aa, synthetic construct
  source 1..156: note = human_IL18_4CS_L15C_E31Q_R147C_delD193
YFGKLESKLSVIRNCNDQVLFIDQGNRPLFQDMTDSDSRDNAPRTIFIISMYKDSQPRGMAVTISVKSEKISTLSSENKIISFKEMNPPDNIKDTKSDIIFFQRSVPGHDNKMQFESSSYEGYFLASEKERDLFKLILKKEDELGDCSIMFTVQNE

SEQ ID NO: 1286 - protein, 156 aa, synthetic construct
  source 1..156: note = human_IL18_4CS_E31Q_T63C_P88C_delD193
YFGKLESKLSVIRNLNDQVLFIDQGNRPLFQDMTDSDSRDNAPRTIFIISMYKDSQPRGMAVCISVKSEKISTLSSENKIISFKEMNCPDNIKDTKSDIIFFQRSVPGHDNKMQFESSSYEGYFLASEKERDLFKLILKKEDELGDRSIMFTVQNE

SEQ ID NO: 1287 - protein, 156 aa, synthetic construct
  source 1..156: note = human_IL18_3CS_N14C_E31Q_S127C_delD193
YFGKLESKLSVIRCLNDQVLFIDQGNRPLFQDMTDSDSRDNAPRTIFIISMYKDSQPRGMAVTISVKSEKISTLSSENKIISFKEMNPPDNIKDTKSDIIFFQRSVPGHDNKMQFESSSYEGYFLACEKERDLFKLILKKEDELGDRSIMFTVQNE

SEQ ID NO: 1288 - protein, 156 aa, synthetic construct
  source 1..156: note = human_IL18_2CS_E31Q_S38R_S127W_delD193
YFGKLESKLSVIRNLNDQVLFIDQGNRPLFQDMTDSDRRDNAPRTIFIISMYKDSQPRGMAVTISVKSEKISTLSSENKIISFKEMNPPDNIKDTKSDIIFFQRSVPGHDNKMQFESSSYEGYFLAWEKERDLFKLILKKEDELGDRSIMFTVQNE

SEQ ID NO: 1289 - protein, 157 aa, synthetic construct
  source 1..157: note = human_IL18_4CS_S10C_D35E_N155C
YFGKLESKLCVIRNLNDQVLFIDQGNRPLFEDMTESDSRDNAPRTIFIISMYKDSQPRGMAVTISVKSEKISTLSSENKIISFKEMNPPDNIKDTKSDIIFFQRSVPGHDNKMQFESSSYEGYFLASEKERDLFKLILKKEDELGDRSIMFTVQCED

SEQ ID NO: 1290 - protein, 157 aa, synthetic construct
  source 1..157: note = human_IL18_4CS_S10C_S36D_N155C
YFGKLESKLCVIRNLNDQVLFIDQGNRPLFEDMTDDDSRDNAPRTIFIISMYKDSQPRGMAVTISVKSEKISTLSSENKIISFKEMNPPDNIKDTKSDIIFFQRSVPGHDNKMQFESSSYEGYFLASEKERDLFKLILKKEDELGDRSIMFTVQCED

SEQ ID NO: 1291 - protein, 157 aa, synthetic construct
  source 1..157: note = human_IL18_4CS_S10C_S36N_N155C
YFGKLESKLCVIRNLNDQVLFIDQGNRPLFEDMTDNDSRDNAPRTIFIISMYKDSQPRGMAVTISVKSEKISTLSSENKIISFKEMNPPDNIKDTKSDIIFFQRSVPGHDNKMQFESSSYEGYFLASEKERDLFKLILKKEDELGDRSIMFTVQCED

SEQ ID NO: 1292 - protein, 157 aa, synthetic construct
  source 1..157: note = human_IL18_4CS_S10C_K53V_N155C
YFGKLESKLCVIRNLNDQVLFIDQGNRPLFEDMTDSDSRDNAPRTIFIISMYVDSQPRGMAVTISVKSEKISTLSSENKIISFKEMNPPDNIKDTKSDIIFFQRSVPGHDNKMQFESSSYEGYFLASEKERDLFKLILKKEDELGDRSIMFTVQCED

SEQ ID NO: 1293 - protein, 157 aa, synthetic construct
  source 1..157: note = human_IL18_4CS_S10C_K53Y_N155C
YFGKLESKLCVIRNLNDQVLFIDQGNRPLFEDMTDSDSRDNAPRTIFIISMYYDSQPRGMAVTISVKSEKISTLSSENKIISFKEMNPPDNIKDTKSDIIFFQRSVPGHDNKMQFESSSYEGYFLASEKERDLFKLILKKEDELGDRSIMFTVQCED

SEQ ID NO: 1294 - protein, 157 aa, synthetic construct
  source 1..157: note = human_IL18_4CS_S10C_K53F_N155C
YFGKLESKLCVIRNLNDQVLFIDQGNRPLFEDMTDSDSRDNAPRTIFIISMYFDSQPRGMAVTISVKSEKISTLSSENKIISFKEMNPPDNIKDTKSDIIFFQRSVPGHDNKMQFESSSYEGYFLASEKERDLFKLILKKEDELGDRSIMFTVQCED

SEQ ID NO: 1295 - protein, 157 aa, synthetic construct
  source 1..157: note = human_IL18_4CS_S10C_M51R_N155C
YFGKLESKLCVIRNLNDQVLFIDQGNRPLFEDMTDSDSRDNAPRTIFIISRYKDSQPRGMAVTISVKSEKISTLSSENKIISFKEMNPPDNIKDTKSDIIFFQRSVPGHDNKMQFESSSYEGYFLASEKERDLFKLILKKEDELGDRSIMFTVQCED

SEQ ID NO: 1296 - protein, 157 aa, synthetic construct
  source 1..157: note = human_IL18_4CS_S10C_M51L_N155C
YFGKLESKLCVIRNLNDQVLFIDQGNRPLFEDMTDSDSRDNAPRTIFIISLYKDSQPRGMAVTISVKSEKISTLSSENKIISFKEMNPPDNIKDTKSDIIFFQRSVPGHDNKMQFESSSYEGYFLASEKERDLFKLILKKEDELGDRSIMFTVQCED

SEQ ID NO: 1297 - protein, 157 aa, synthetic construct
  source 1..157: note = human_IL18_4CS_S10C_M51H_N155C
YFGKLESKLCVIRNLNDQVLFIDQGNRPLFEDMTDSDSRDNAPRTIFIISHYKDSQPRGMAVTISVKSEKISTLSSENKIISFKEMNPPDNIKDTKSDIIFFQRSVPGHDNKMQFESSSYEGYFLASEKERDLFKLILKKEDELGDRSIMFTVQCED

SEQ ID NO: 1298 - protein, 157 aa, synthetic construct
  source 1..157: note = human_IL18_4CS_S10C_M51F_N155C
YFGKLESKLCVIRNLNDQVLFIDQGNRPLFEDMTDSDSRDNAPRTIFIISFYKDSQPRGMAVTISVKSEKISTLSSENKIISFKEMNPPDNIKDTKSDIIFFQRSVPGHDNKMQFESSSYEGYFLASEKERDLFKLILKKEDELGDRSIMFTVQCED

SEQ ID NO: 1299 - protein, 157 aa, synthetic construct
  source 1..157: note = human_IL18_4CS_S10C_M51Y_N155C
YFGKLESKLCVIRNLNDQVLFIDQGNRPLFEDMTDSDSRDNAPRTIFIISYYKDSQPRGMAVTISVKSEKISTLSSENKIISFKEMNPPDNIKDTKSDIIFFQRSVPGHDNKMQFESSSYEGYFLASEKERDLFKLILKKEDELGDRSIMFTVQCED

SEQ ID NO: 1300 - protein, 157 aa, synthetic construct
  source 1..157: note = human_IL18_4CS_S10C_S55D_N155C
YFGKLESKLCVIRNLNDQVLFIDQGNRPLFEDMTDSDSRDNAPRTIFIISMYKDDQPRGMAVTISVKSEKISTLSSENKIISFKEMNPPDNIKDTKSDIIFFQRSVPGHDNKMQFESSSYEGYFLASEKERDLFKLILKKEDELGDRSIMFTVQCED

SEQ ID NO: 1301 - protein, 157 aa, synthetic construct
  source 1..157: note = human_IL18_4CS_S10C_S55E_N155C
YFGKLESKLCVIRNLNDQVLFIDQGNRPLFEDMTDSDSRDNAPRTIFIISMYKDEQPRGMAVTISVKSEKISTLSSENKIISFKEMNPPDNIKDTKSDIIFFQRSVPGHDNKMQFESSSYEGYFLASEKERDLFKLILKKEDELGDRSIMFTVQCED

SEQ ID NO: 1302 - protein, 157 aa, synthetic construct
  source 1..157: note = human_IL18_4CS_S10C_S55T_N155C
YFGKLESKLCVIRNLNDQVLFIDQGNRPLFEDMTDSDSRDNAPRTIFIISMYKDTQPRGMAVTISVKSEKISTLSSENKIISFKEMNPPDNIKDTKSDIIFFQRSVPGHDNKMQFESSSYEGYFLASEKERDLFKLILKKEDELGDRSIMFTVQCED

SEQ ID NO: 1303 - protein, 157 aa, synthetic construct
  source 1..157: note = human_IL18_4CS_S10C_P57Q_N155C
YFGKLESKLCVIRNLNDQVLFIDQGNRPLFEDMTDSDSRDNAPRTIFIISMYKDSQQRGMAVTISVKSEKISTLSSENKIISFKEMNPPDNIKDTKSDIIFFQRSVPGHDNKMQFESSSYEGYFLASEKERDLFKLILKKEDELGDRSIMFTVQCED

SEQ ID NO: 1304 - protein, 157 aa, synthetic construct
  source 1..157: note = human_IL18_4CS_S10C_P57D_N155C
YFGKLESKLCVIRNLNDQVLFIDQGNRPLFEDMTDSDSRDNAPRTIFIISMYKDSQDRGMAVTISVKSEKISTLSSENKIISFKEMNPPDNIKDTKSDIIFFQRSVPGHDNKMQFESSSYEGYFLASEKERDLFKLILKKEDELGDRSIMFTVQCED

SEQ ID NO: 1305 - protein, 157 aa, synthetic construct
  source 1..157: note = human_IL18_4CS_S10C_P57Y_N155C
YFGKLESKLCVIRNLNDQVLFIDQGNRPLFEDMTDSDSRDNAPRTIFIISMYKDSQYRGMAVTISVKSEKISTLSSENKIISFKEMNPPDNIKDTKSDIIFFQRSVPGHDNKMQFESSSYEGYFLASEKERDLFKLILKKEDELGDRSIMFTVQCED

SEQ ID NO: 1306 - protein, 157 aa, synthetic construct
  source 1..157: note = human_IL18_4CS_S10C_P57N_N155C
YFGKLESKLCVIRNLNDQVLFIDQGNRPLFEDMTDSDSRDNAPRTIFIISMYKDSQNRGMAVTISVKSEKISTLSSENKIISFKEMNPPDNIKDTKSDIIFFQRSVPGHDNKMQFESSSYEGYFLASEKERDLFKLILKKEDELGDRSIMFTVQCED

SEQ ID NO: 1307 - protein, 157 aa, synthetic construct
  source 1..157: note = human_IL18_4CS_S10C_M60Y_N155C
YFGKLESKLCVIRNLNDQVLFIDQGNRPLFEDMTDSDSRDNAPRTIFIISMYKDSQPRGYAVTISVKSEKISTLSSENKIISFKEMNPPDNIKDTKSDIIFFQRSVPGHDNKMQFESSSYEGYFLASEKERDLFKLILKKEDELGDRSIMFTVQCED

SEQ ID NO: 1308 - protein, 157 aa, synthetic construct
  source 1..157: note = human_IL18_4CS_S10C_M60F_N155C
YFGKLESKLCVIRNLNDQVLFIDQGNRPLFEDMTDSDSRDNAPRTIFIISMYKDSQPRGFAVTISVKSEKISTLSSENKIISFKEMNPPDNIKDTKSDIIFFQRSVPGHDNKMQFESSSYEGYFLASEKERDLFKLILKKEDELGDRSIMFTVQCED

SEQ ID NO: 1309 - protein, 157 aa, synthetic construct
  source 1..157: note = human_IL18_4CS_S10C_D110Q_N155C
YFGKLESKLCVIRNLNDQVLFIDQGNRPLFEDMTDSDSRDNAPRTIFIISMYKDSQPRGMAVTISVKSEKISTLSSENKIISFKEMNPPDNIKDTKSDIIFFQRSVPGHQNKMQFESSSYEGYFLASEKERDLFKLILKKEDELGDRSIMFTVQCED

SEQ ID NO: 1310 - protein, 157 aa, synthetic construct
  source 1..157: note = human_IL18_4CS_S10C_D110R_N155C
YFGKLESKLCVIRNLNDQVLFIDQGNRPLFEDMTDSDSRDNAPRTIFIISMYKDSQPRGMAVTISVKSEKISTLSSENKIISFKEMNPPDNIKDTKSDIIFFQRSVPGHRNKMQFESSSYEGYFLASEKERDLFKLILKKEDELGDRSIMFTVQCED

SEQ ID NO: 1311 - protein, 157 aa, synthetic construct
  source 1..157: note = human_IL18_4CS_S10C_N111D_N155C
YFGKLESKLCVIRNLNDQVLFIDQGNRPLFEDMTDSDSRDNAPRTIFIISMYKDSQPRGMAVTISVKSEKISTLSSENKIISFKEMNPPDNIKDTKSDIIFFQRSVPGHDDKMQFESSSYEGYFLASEKERDLFKLILKKEDELGDRSIMFTVQCED

SEQ ID NO: 1312 - protein, 157 aa, synthetic construct
  source 1..157: note = human_IL18_4CS_S10C_N111S_N155C
YFGKLESKLCVIRNLNDQVLFIDQGNRPLFEDMTDSDSRDNAPRTIFIISMYKDSQPRGMAVTISVKSEKISTLSSENKIISFKEMNPPDNIKDTKSDIIFFQRSVPGHDSKMQFESSSYEGYFLASEKERDLFKLILKKEDELGDRSIMFTVQCED

SEQ ID NO: 1313 - protein, 157 aa, synthetic construct
  source 1..157: note = human_IL18_4CS_S10C_N111T_N155C
YFGKLESKLCVIRNLNDQVLFIDQGNRPLFEDMTDSDSRDNAPRTIFIISMYKDSQPRGMAVTISVKSEKISTLSSENKIISFKEMNPPDNIKDTKSDIIFFQRSVPGHDTKMQFESSSYEGYFLASEKERDLFKLILKKEDELGDRSIMFTVQCED

SEQ ID NO: 1314 - protein, 157 aa, synthetic construct
  source 1..157: note = human_IL18_4CS_S10C_N111E_N155C
YFGKLESKLCVIRNLNDQVLFIDQGNRPLFEDMTDSDSRDNAPRTIFIISMYKDSQPRGMAVTISVKSEKISTLSSENKIISFKEMNPPDNIKDTKSDIIFFQRSVPGHDEKMQFESSSYEGYFLASEKERDLFKLILKKEDELGDRSIMFTVQCED

SEQ ID NO: 1315 - protein, 157 aa, synthetic construct
  source 1..157: note = human_IL18_4CS_S10C_D132Q_N155C
YFGKLESKLCVIRNLNDQVLFIDQGNRPLFEDMTDSDSRDNAPRTIFIISMYKDSQPRGMAVTISVKSEKISTLSSENKIISFKEMNPPDNIKDTKSDIIFFQRSVPGHDNKMQFESSSYEGYFLASEKERQLFKLILKKEDELGDRSIMFTVQCED

SEQ ID NO: 1316 - protein, 157 aa, synthetic construct
  source 1..157: note = human_IL18_4CS_S10C_D132E_N155C
YFGKLESKLCVIRNLNDQVLFIDQGNRPLFEDMTDSDSRDNAPRTIFIISMYKDSQPRGMAVTISVKSEKISTLSSENKIISFKEMNPPDNIKDTKSDIIFFQRSVPGHDNKMQFESSSYEGYFLASEKERELFKLILKKEDELGDRSIMFTVQCED

SEQ ID NO: 1317 - protein, 157 aa, synthetic construct
  source 1..157: note = human_IL18_4CS_E6Q_S10C_K53D_N155C
YFGKLQSKLCVIRNLNDQVLFIDQGNRPLFEDMTDSDSRDNAPRTIFIISMYDDSQPRGMAVTISVKSEKISTLSSENKIISFKEMNPPDNIKDTKSDIIFFQRSVPGHDNKMQFESSSYEGYFLASEKERDLFKLILKKEDELGDRSIMFTVQCED

SEQ ID NO: 1318 - protein, 157 aa, synthetic construct
  source 1..157: note = human_IL18_4CS_E6Q_S10C_M51K_K53D_N155C
YFGKLQSKLCVIRNLNDQVLFIDQGNRPLFEDMTDSDSRDNAPRTIFIISKYDDSQPRGMAVTISVKSEKISTLSSENKIISFKEMNPPDNIKDTKSDIIFFQRSVPGHDNKMQFESSSYEGYFLASEKERDLFKLILKKEDELGDRSIMFTVQCED

SEQ ID NO: 1319 - protein, 157 aa, synthetic construct
  source 1..157: note = human_IL18_4CS_S10C_E31Q_D35N_N41Q_K53A_N155C
YFGKLESKLCVIRNLNDQVLFIDQGNRPLFQDMTNSDSRDQAPRTIFIISMYADSQPRGMAVTISVKSEKISTLSSENKIISFKEMNPPDNIKDTKSDIIFFQRSVPGHDNKMQFESSSYEGYFLASEKERDLFKLILKKEDELGDRSIMFTVQCED

SEQ ID NO: 1320 - protein, 157 aa, synthetic construct
  source 1..157: note = human_IL18_4CS_S10C_E31Q_N41Q_K53A_N155C
YFGKLESKLCVIRNLNDQVLFIDQGNRPLFQDMTDSDSRDQAPRTIFIISMYADSQPRGMAVTISVKSEKISTLSSENKIISFKEMNPPDNIKDTKSDIIFFQRSVPGHDNKMQFESSSYEGYFLASEKERDLFKLILKKEDELGDRSIMFTVQCED

SEQ ID NO: 1321 - protein, 157 aa, synthetic construct
  source 1..157: note = human_IL18_4CS_S10C_E31Q_K53A_N155C
YFGKLESKLCVIRNLNDQVLFIDQGNRPLFQDMTDSDSRDNAPRTIFIISMYADSQPRGMAVTISVKSEKISTLSSENKIISFKEMNPPDNIKDTKSDIIFFQRSVPGHDNKMQFESSSYEGYFLASEKERDLFKLILKKEDELGDRSIMFTVQCED

SEQ ID NO: 1322 - protein, 157 aa, synthetic construct
  source 1..157: note = human_IL18_4CS_S10C_K53T_N155C
YFGKLESKLCVIRNLNDQVLFIDQGNRPLFEDMTDSDSRDNAPRTIFIISMYTDSQPRGMAVTISVKSEKISTLSSENKIISFKEMNPPDNIKDTKSDIIFFQRSVPGHDNKMQFESSSYEGYFLASEKERDLFKLILKKEDELGDRSIMFTVQCED

SEQ ID NO: 1323 - protein, 157 aa, synthetic construct
  source 1..157: note = human_IL18_4CS_S10C_P57A_N155C
YFGKLESKLCVIRNLNDQVLFIDQGNRPLFEDMTDSDSRDNAPRTIFIISMYKDSQARGMAVTISVKSEKISTLSSENKIISFKEMNPPDNIKDTKSDIIFFQRSVPGHDNKMQFESSSYEGYFLASEKERDLFKLILKKEDELGDRSIMFTVQCED

SEQ ID NO: 1324 - protein, 157 aa, synthetic construct
  source 1..157: note = human_IL18_4CS_S10C_S76G_N155C
YFGKLESKLCVIRNLNDQVLFIDQGNRPLFEDMTDSDSRDNAPRTIFIISMYKDSQPRGMAVTISVKSEKISTLSGENKIISFKEMNPPDNIKDTKSDIIFFQRSVPGHDNKMQFESSSYEGYFLASEKERDLFKLILKKEDELGDRSIMFTVQCED

SEQ ID NO: 1325 - protein, 157 aa, synthetic construct
  source 1..157: note = human_IL18_4CS_S10C_S76A_N155C
YFGKLESKLCVIRNLNDQVLFIDQGNRPLFEDMTDSDSRDNAPRTIFIISMYKDSQPRGMAVTISVKSEKISTLSAENKIISFKEMNPPDNIKDTKSDIIFFQRSVPGHDNKMQFESSSYEGYFLASEKERDLFKLILKKEDELGDRSIMFTVQCED

SEQ ID NO: 1326 - protein, 157 aa, synthetic construct
  source 1..157: note = human_IL18_4CS_S10C_M51K_K53D_N155C
YFGKLESKLCVIRNLNDQVLFIDQGNRPLFEDMTDSDSRDNAPRTIFIISKYDDSQPRGMAVTISVKSEKISTLSSENKIISFKEMNPPDNIKDTKSDIIFFQRSVPGHDNKMQFESSSYEGYFLASEKERDLFKLILKKEDELGDRSIMFTVQCED

SEQ ID NO: 1327 - protein, 157 aa, synthetic construct
  source 1..157: note = human_IL18_4CS_S10C_M51K_K53E_N155C
YFGKLESKLCVIRNLNDQVLFIDQGNRPLFEDMTDSDSRDNAPRTIFIISKYEDSQPRGMAVTISVKSEKISTLSSENKIISFKEMNPPDNIKDTKSDIIFFQRSVPGHDNKMQFESSSYEGYFLASEKERDLFKLILKKEDELGDRSIMFTVQCED

SEQ ID NO: 1328 - protein, 157 aa, synthetic construct
  source 1..157: note = human_IL18_4CS_E6Q_S10C_K53E_N155C
YFGKLQSKLCVIRNLNDQVLFIDQGNRPLFEDMTDSDSRDNAPRTIFIISMYEDSQPRGMAVTISVKSEKISTLSSENKIISFKEMNPPDNIKDTKSDIIFFQRSVPGHDNKMQFESSSYEGYFLASEKERDLFKLILKKEDELGDRSIMFTVQCED

SEQ ID NO: 1329 - protein, 157 aa, synthetic construct
  source 1..157: note = human_IL18_4CS_E6Q_S10C_M51K_K53E_N155C
YFGKLQSKLCVIRNLNDQVLFIDQGNRPLFEDMTDSDSRDNAPRTIFIISKYEDSQPRGMAVTISVKSEKISTLSSENKIISFKEMNPPDNIKDTKSDIIFFQRSVPGHDNKMQFESSSYEGYFLASEKERDLFKLILKKEDELGDRSIMFTVQCED

SEQ ID NO: 1330 - protein, 157 aa, synthetic construct
  source 1..157: note = human_IL18_4CS_E6Q_S10C_M51K_P57E_N155C
YFGKLQSKLCVIRNLNDQVLFIDQGNRPLFEDMTDSDSRDNAPRTIFIISKYKDSQERGMAVTISVKSEKISTLSSENKIISFKEMNPPDNIKDTKSDIIFFQRSVPGHDNKMQFESSSYEGYFLASEKERDLFKLILKKEDELGDRSIMFTVQCED

SEQ ID NO: 1331 - protein, 157 aa, synthetic construct
  source 1..157: note = human_IL18_4CS_S10C_M51K_P57E_N155C
YFGKLESKLCVIRNLNDQVLFIDQGNRPLFEDMTDSDSRDNAPRTIFIISKYKDSQERGMAVTISVKSEKISTLSSENKIISFKEMNPPDNIKDTKSDIIFFQRSVPGHDNKMQFESSSYEGYFLASEKERDLFKLILKKEDELGDRSIMFTVQCED

SEQ ID NO: 1332 - protein, 157 aa, synthetic construct
  source 1..157: note = human_IL18_4CS_E6Q_S10C_P57E_N155C
YFGKLQSKLCVIRNLNDQVLFIDQGNRPLFEDMTDSDSRDNAPRTIFIISMYKDSQERGMAVTISVKSEKISTLSSENKIISFKEMNPPDNIKDTKSDIIFFQRSVPGHDNKMQFESSSYEGYFLASEKERDLFKLILKKEDELGDRSIMFTVQCED

SEQ ID NO: 1333 - protein, 157 aa, synthetic construct
  source 1..157: note = human_IL18_4CS_S10C_E31Q_K53T_N155C
YFGKLESKLCVIRNLNDQVLFIDQGNRPLFQDMTDSDSRDNAPRTIFIISMYTDSQPRGMAVTISVKSEKISTLSSENKIISFKEMNPPDNIKDTKSDIIFFQRSVPGHDNKMQFESSSYEGYFLASEKERDLFKLILKKEDELGDRSIMFTVQCED

SEQ ID NO: 1334 - protein, 157 aa, synthetic construct
  source 1..157: note = human_IL18_4CS_S10C_K53G_P57E_N155C
YFGKLESKLCVIRNLNDQVLFIDQGNRPLFEDMTDSDSRDNAPRTIFIISMYGDSQERGMAVTISVKSEKISTLSSENKIISFKEMNPPDNIKDTKSDIIFFQRSVPGHDNKMQFESSSYEGYFLASEKERDLFKLILKKEDELGDRSIMFTVQCED

SEQ ID NO: 1335 - protein, 157 aa, synthetic construct
  source 1..157: note = human_IL18_4CS_S10C_K53T_P57E_N155C
YFGKLESKLCVIRNLNDQVLFIDQGNRPLFEDMTDSDSRDNAPRTIFIISMYTDSQERGMAVTISVKSEKISTLSSENKIISFKEMNPPDNIKDTKSDIIFFQRSVPGHDNKMQFESSSYEGYFLASEKERDLFKLILKKEDELGDRSIMFTVQCED

SEQ ID NO: 1336 - protein, 157 aa, synthetic construct
  source 1..157: note = human_IL18_4CS_S10C_K53A_P57E_N155C
YFGKLESKLCVIRNLNDQVLFIDQGNRPLFEDMTDSDSRDNAPRTIFIISMYADSQERGMAVTISVKSEKISTLSSENKIISFKEMNPPDNIKDTKSDIIFFQRSVPGHDNKMQFESSSYEGYFLASEKERDLFKLILKKEDELGDRSIMFTVQCED

SEQ ID NO: 1337 - protein, 157 aa, synthetic construct
  source 1..157: note = human_IL18_4CS_S10C_P57E_N155C
YFGKLESKLCVIRNLNDQVLFIDQGNRPLFEDMTDSDSRDNAPRTIFIISMYKDSQERGMAVTISVKSEKISTLSSENKIISFKEMNPPDNIKDTKSDIIFFQRSVPGHDNKMQFESSSYEGYFLASEKERDLFKLILKKEDELGDRSIMFTVQCED

SEQ ID NO: 1338 - protein, 157 aa, synthetic construct
  source 1..157: note = human_IL18_4CS_S10C_K53D_N155C
YFGKLESKLCVIRNLNDQVLFIDQGNRPLFEDMTDSDSRDNAPRTIFIISMYDDSQPRGMAVTISVKSEKISTLSSENKIISFKEMNPPDNIKDTKSDIIFFQRSVPGHDNKMQFESSSYEGYFLASEKERDLFKLILKKEDELGDRSIMFTVQCED

SEQ ID NO: 1339 - protein, 157 aa, synthetic construct
  source 1..157: note = human_IL18_4CS_S10C_E31Q_N41Q_N155C
YFGKLESKLCVIRNLNDQVLFIDQGNRPLFQDMTDSDSRDQAPRTIFIISMYKDSQPRGMAVTISVKSEKISTLSSENKIISFKEMNPPDNIKDTKSDIIFFQRSVPGHDNKMQFESSSYEGYFLASEKERDLFKLILKKEDELGDRSIMFTVQCED

SEQ ID NO: 1340 - protein, 157 aa, synthetic construct
  source 1..157: note = human_IL18_4CS_S10C_K53A_N155C
YFGKLESKLCVIRNLNDQVLFIDQGNRPLFEDMTDSDSRDNAPRTIFIISMYADSQPRGMAVTISVKSEKISTLSSENKIISFKEMNPPDNIKDTKSDIIFFQRSVPGHDNKMQFESSSYEGYFLASEKERDLFKLILKKEDELGDRSIMFTVQCED

SEQ ID NO: 1341 - protein, 157 aa, synthetic construct
  source 1..157: note = human_IL18_4CS_S10C_K53G_N155C
YFGKLESKLCVIRNLNDQVLFIDQGNRPLFEDMTDSDSRDNAPRTIFIISMYGDSQPRGMAVTISVKSEKISTLSSENKIISFKEMNPPDNIKDTKSDIIFFQRSVPGHDNKMQFESSSYEGYFLASEKERDLFKLILKKEDELGDRSIMFTVQCED

SEQ ID NO: 1342 - protein, 157 aa, synthetic construct
  source 1..157: note = human_IL18_4CS_S10C_K53E_N155C
YFGKLESKLCVIRNLNDQVLFIDQGNRPLFEDMTDSDSRDNAPRTIFIISMYEDSQPRGMAVTISVKSEKISTLSSENKIISFKEMNPPDNIKDTKSDIIFFQRSVPGHDNKMQFESSSYEGYFLASEKERDLFKLILKKEDELGDRSIMFTVQCED

SEQ ID NO: 1343 - protein, 157 aa, synthetic construct
  source 1..157: note = human_IL18_4CS_S10C_K53S_N155C
YFGKLESKLCVIRNLNDQVLFIDQGNRPLFEDMTDSDSRDNAPRTIFIISMYSDSQPRGMAVTISVKSEKISTLSSENKIISFKEMNPPDNIKDTKSDIIFFQRSVPGHDNKMQFESSSYEGYFLASEKERDLFKLILKKEDELGDRSIMFTVQCED

SEQ ID NO: 1344 - protein, 157 aa, synthetic construct
  source 1..157: note = human_IL18_4CS_S10C_M51L_K53D_N155C
YFGKLESKLCVIRNLNDQVLFIDQGNRPLFEDMTDSDSRDNAPRTIFIISLYDDSQPRGMAVTISVKSEKISTLSSENKIISFKEMNPPDNIKDTKSDIIFFQRSVPGHDNKMQFESSSYEGYFLASEKERDLFKLILKKEDELGDRSIMFTVQCED

SEQ ID NO: 1345 - protein, 157 aa, synthetic construct
  source 1..157: note = human_IL18_4CS_S10C_K53D_D110R_N155C
YFGKLESKLCVIRNLNDQVLFIDQGNRPLFEDMTDSDSRDNAPRTIFIISMYDDSQPRGMAVTISVKSEKISTLSSENKIISFKEMNPPDNIKDTKSDIIFFQRSVPGHRNKMQFESSSYEGYFLASEKERDLFKLILKKEDELGDRSIMFTVQCED

SEQ ID NO: 1346 - protein, 157 aa, synthetic construct
  source 1..157: note = human_IL18_4CS_S10C_K53D_N111T_N155C
YFGKLESKLCVIRNLNDQVLFIDQGNRPLFEDMTDSDSRDNAPRTIFIISMYDDSQPRGMAVTISVKSEKISTLSSENKIISFKEMNPPDNIKDTKSDIIFFQRSVPGHDTKMQFESSSYEGYFLASEKERDLFKLILKKEDELGDRSIMFTVQCED

SEQ ID NO: 1347 - protein, 157 aa, synthetic construct
  source 1..157: note = human_IL18_4CS_S10C_K53D_S55T_N155C
YFGKLESKLCVIRNLNDQVLFIDQGNRPLFEDMTDSDSRDNAPRTIFIISMYDDTQPRGMAVTISVKSEKISTLSSENKIISFKEMNPPDNIKDTKSDIIFFQRSVPGHDNKMQFESSSYEGYFLASEKERDLFKLILKKEDELGDRSIMFTVQCED

SEQ ID NO: 1348 - protein, 157 aa, synthetic construct
  source 1..157: note = human_IL18_4CS_S10C_K53D_S55T_D110R_N155C
YFGKLESKLCVIRNLNDQVLFIDQGNRPLFEDMTDSDSRDNAPRTIFIISMYDDTQPRGMAVTISVKSEKISTLSSENKIISFKEMNPPDNIKDTKSDIIFFQRSVPGHRNKMQFESSSYEGYFLASEKERDLFKLILKKEDELGDRSIMFTVQCED

SEQ ID NO: 1349 - protein, 157 aa, synthetic construct
  source 1..157: note = human_IL18_4CS_S10C_M51L_K53D_S55T_D110R_N111T_N155C
YFGKLESKLCVIRNLNDQVLFIDQGNRPLFEDMTDSDSRDNAPRTIFIISLYDDTQPRGMAVTISVKSEKISTLSSENKIISFKEMNPPDNIKDTKSDIIFFQRSVPGHRTKMQFESSSYEGYFLASEKERDLFKLILKKEDELGDRSIMFTVQCED

SEQ ID NO: 1350 - protein, 157 aa, synthetic construct
  source 1..157: note = human_IL18_4CS_S10C_M51L_K53D_S55T_D110R_N155C
YFGKLESKLCVIRNLNDQVLFIDQGNRPLFEDMTDSDSRDNAPRTIFIISLYDDTQPRGMAVTISVKSEKISTLSSENKIISFKEMNPPDNIKDTKSDIIFFQRSVPGHRNKMQFESSSYEGYFLASEKERDLFKLILKKEDELGDRSIMFTVQCED

SEQ ID NO: 1351 - protein, 157 aa, synthetic construct
  source 1..157: note = human_IL18_4CS_S10C_K53D_S55T_D110R_N111T_N155C
YFGKLESKLCVIRNLNDQVLFIDQGNRPLFEDMTDSDSRDNAPRTIFIISMYDDTQPRGMAVTISVKSEKISTLSSENKIISFKEMNPPDNIKDTKSDIIFFQRSVPGHRTKMQFESSSYEGYFLASEKERDLFKLILKKEDELGDRSIMFTVQCED

SEQ ID NO: 1352 - protein, 157 aa, synthetic construct
  source 1..157: note = human_IL18_4CS_S10C_K53D_S55T_N111T_N155C
YFGKLESKLCVIRNLNDQVLFIDQGNRPLFEDMTDSDSRDNAPRTIFIISMYDDTQPRGMAVTISVKSEKISTLSSENKIISFKEMNPPDNIKDTKSDIIFFQRSVPGHDTKMQFESSSYEGYFLASEKERDLFKLILKKEDELGDRSIMFTVQCED

SEQ ID NO: 1353 - protein, 157 aa, synthetic construct
  source 1..157: note = human_IL18_4CS_S10C_E31Q_D35N_N155C
YFGKLESKLCVIRNLNDQVLFIDQGNRPLFQDMTNSDSRDNAPRTIFIISMYKDSQPRGMAVTISVKSEKISTLSSENKIISFKEMNPPDNIKDTKSDIIFFQRSVPGHDNKMQFESSSYEGYFLASEKERDLFKLILKKEDELGDRSIMFTVQCED

SEQ ID NO: 1354 - protein, 157 aa, synthetic construct
  source 1..157: note = human_IL18_4CS_S10C_N41Q_N155C
YFGKLESKLCVIRNLNDQVLFIDQGNRPLFEDMTDSDSRDQAPRTIFIISMYKDSQPRGMAVTISVKSEKISTLSSENKIISFKEMNPPDNIKDTKSDIIFFQRSVPGHDNKMQFESSSYEGYFLASEKERDLFKLILKKEDELGDRSIMFTVQCED

SEQ ID NO: 1355 - protein, 157 aa, synthetic construct
  source 1..157: note = human_IL18_4CS_S10C_D35N_N155C
YFGKLESKLCVIRNLNDQVLFIDQGNRPLFEDMTNSDSRDNAPRTIFIISMYKDSQPRGMAVTISVKSEKISTLSSENKIISFKEMNPPDNIKDTKSDIIFFQRSVPGHDNKMQFESSSYEGYFLASEKERDLFKLILKKEDELGDRSIMFTVQCED

SEQ ID NO: 1356 - protein, 157 aa, synthetic construct
  source 1..157: note = human_IL18_4CS_S10C_D37N_N155C
YFGKLESKLCVIRNLNDQVLFIDQGNRPLFEDMTDSNSRDNAPRTIFIISMYKDSQPRGMAVTISVKSEKISTLSSENKIISFKEMNPPDNIKDTKSDIIFFQRSVPGHDNKMQFESSSYEGYFLASEKERDLFKLILKKEDELGDRSIMFTVQCED

SEQ ID NO: 1357 - protein, 157 aa, synthetic construct
  source 1..157: note = human_IL18_4CS_S10C_E31Q_D37N_N155C
YFGKLESKLCVIRNLNDQVLFIDQGNRPLFQDMTDSNSRDNAPRTIFIISMYKDSQPRGMAVTISVKSEKISTLSSENKIISFKEMNPPDNIKDTKSDIIFFQRSVPGHDNKMQFESSSYEGYFLASEKERDLFKLILKKEDELGDRSIMFTVQCED

SEQ ID NO: 1358 - protein, 157 aa, synthetic construct
  source 1..157: note = human_IL18_4CS_S10C_D35N_D37N_N155C
YFGKLESKLCVIRNLNDQVLFIDQGNRPLFEDMTNSNSRDNAPRTIFIISMYKDSQPRGMAVTISVKSEKISTLSSENKIISFKEMNPPDNIKDTKSDIIFFQRSVPGHDNKMQFESSSYEGYFLASEKERDLFKLILKKEDELGDRSIMFTVQCED

SEQ ID NO: 1359 - protein, 157 aa, synthetic construct
  source 1..157: note human_IL18_4CS_E6Q_S10C_M51L_K53D_S55T_D110R_N111T_N155C
YFGKLQSKLCVIRNLNDQVLFIDQGNRPLFEDMTDSDSRDNAPRTIFIISLYDDTQPRGMAVTISVKSEKISTLSSENKIISFKEMNPPDNIKDTKSDIIFFQRSVPGHRTKMQFESSSYEGYFLASEKERDLFKLILKKEDELGDRSIMFTVQCED

SEQ ID NO: 1360 - protein, 157 aa, synthetic construct
  source 1..157: note = human_IL18_4CS_S10C_K53D_H109Y_N155C
YFGKLESKLCVIRNLNDQVLFIDQGNRPLFEDMTDSDSRDNAPRTIFIISMYDDSQPRGMAVTISVKSEKISTLSSENKIISFKEMNPPDNIKDTKSDIIFFQRSVPGYDNKMQFESSSYEGYFLASEKERDLFKLILKKEDELGDRSIMFTVQCED

SEQ ID NO: 1361 - protein, 157 aa, synthetic construct
  source 1..157: note = human_IL18_4CS_S10C_D37N_K53D_N155C
YFGKLESKLCVIRNLNDQVLFIDQGNRPLFEDMTDSNSRDNAPRTIFIISMYDDSQPRGMAVTISVKSEKISTLSSENKIISFKEMNPPDNIKDTKSDIIFFQRSVPGHDNKMQFESSSYEGYFLASEKERDLFKLILKKEDELGDRSIMFTVQCED

SEQ ID NO: 1362 - protein, 157 aa, synthetic construct
  source 1..157: note = human_IL18_4CS_S10C_D35N_K53D_N155C
YFGKLESKLCVIRNLNDQVLFIDQGNRPLFEDMTNSDSRDNAPRTIFIISMYDDSQPRGMAVTISVKSEKISTLSSENKIISFKEMNPPDNIKDTKSDIIFFQRSVPGHDNKMQFESSSYEGYFLASEKERDLFKLILKKEDELGDRSIMFTVQCED

SEQ ID NO: 1363 - protein, 157 aa, synthetic construct
  source 1..157: note = human_IL18_4CS_K8E_S10C_K53D_N155C
YFGKLESELCVIRNLNDQVLFIDQGNRPLFEDMTDSDSRDNAPRTIFIISMYDDSQPRGMAVTISVKSEKISTLSSENKIISFKEMNPPDNIKDTKSDIIFFQRSVPGHDNKMQFESSSYEGYFLASEKERDLFKLILKKEDELGDRSIMFTVQCED

SEQ ID NO: 1364 - protein, 157 aa, synthetic construct
  source 1..157: note = human_IL18_4CS_S10C_E31Q_K53D_N155C
YFGKLESKLCVIRNLNDQVLFIDQGNRPLFQDMTDSDSRDNAPRTIFIISMYDDSQPRGMAVTISVKSEKISTLSSENKIISFKEMNPPDNIKDTKSDIIFFQRSVPGHDNKMQFESSSYEGYFLASEKERDLFKLILKKEDELGDRSIMFTVQCED

SEQ ID NO: 1365 - protein, 157 aa, synthetic construct
  source 1..157: note = human_IL18_4CS_S10C_N41Q_K53D_N155C
YFGKLESKLCVIRNLNDQVLFIDQGNRPLFEDMTDSDSRDQAPRTIFIISMYDDSQPRGMAVTISVKSEKISTLSSENKIISFKEMNPPDNIKDTKSDIIFFQRSVPGHDNKMQFESSSYEGYFLASEKERDLFKLILKKEDELGDRSIMFTVQCED

SEQ ID NO: 1366 - protein, 157 aa, synthetic construct
  source 1..157: note = human_IL18_4CS_S10C_K53D_P57V_N155C
YFGKLESKLCVIRNLNDQVLFIDQGNRPLFEDMTDSDSRDNAPRTIFIISMYDDSQVRGMAVTISVKSEKISTLSSENKIISFKEMNPPDNIKDTKSDIIFFQRSVPGHDNKMQFESSSYEGYFLASEKERDLFKLILKKEDELGDRSIMFTVQCED

SEQ ID NO: 1367 - protein, 157 aa, synthetic construct
  source 1..157: note = human_IL18_4CS_S10C_K53D_P57T_N155C
YFGKLESKLCVIRNLNDQVLFIDQGNRPLFEDMTDSDSRDNAPRTIFIISMYDDSQTRGMAVTISVKSEKISTLSSENKIISFKEMNPPDNIKDTKSDIIFFQRSVPGHDNKMQFESSSYEGYFLASEKERDLFKLILKKEDELGDRSIMFTVQCED

SEQ ID NO: 1368 - protein, 157 aa, synthetic construct
  source 1..157: note = human_IL18_4CS_E6Q_S10C_K53D_N111T_N155C
YFGKLQSKLCVIRNLNDQVLFIDQGNRPLFEDMTDSDSRDNAPRTIFIISMYDDSQPRGMAVTISVKSEKISTLSSENKIISFKEMNPPDNIKDTKSDIIFFQRSVPGHDTKMQFESSSYEGYFLASEKERDLFKLILKKEDELGDRSIMFTVQCED

SEQ ID NO: 1369 - protein, 157 aa, synthetic construct
  VARIANT 1: note = tyrosine or histidine
  VARIANT 39: note = arginine, threonine, serine, or proline
  VARIANT 67: note = lysine, glutamine, or asparagine
  VARIANT 87: note = asparagine, serine, or aspartic acid
XFGKLEPKLSIIRNLNDQVLFINQGNQPVFEDMPDSDCXDNAPQTIFIIYMYKDSLTRGLAVTISVXCKKMSTLSCKNKIISFKEMXPPDNIDDEGSDIIFFQRSVPGHDDKIQFESSLYKGYFLACKKENDLFKLILKKKDENGDKSVMFTVQNQN

SEQ ID NO: 1370 - protein, 157 aa, Homo sapiens
YFGKLESKLSVIRNLNDQCLFIDQGNRPLFEDMTDSDCRDNAPRTIFIISMYKDSQPRGMAVTISVKCEKISTLSCENKIISFKEMNPPDNIKDTKSDIIFFQRSVPGHDNKMQFESSSYEGYFLACEKERDLFKLILKKEDELGDRSIMFTVQNED

SEQ ID NO: 1371 - protein, 157 aa, Equus caballus
YFGRLEPKLSIIRNLNDQVLFINQGNQPVFEDMPDSDCTDNAPQTVFIIYMYKDSLTRGLAVTISVKCEKTSTLSCKNKIISFKEMSPPENINDEGNDIIFFQRSVPGHDDKIQFESSLYKGYFLACEKENDLFKLILKEKDENGDKSVMFTVQNQN

SEQ ID NO: 1372 - protein, 157 aa, Bos taurus
HFGKLEPKLSIIRNLNDQVLFINQGNQPVFEDMPDSDCSDNAPQTIFIIYMYKDSLTRGLAVTISVQCKKMSTLSCENKIVSFKEMNPPDNIDNEESDIIFFQRSVPGHDDKIQFESSLYKGYFLACKKENDLFKLILKKQDDNRDKSVMFTVQNQN

SEQ ID NO: 1373 - protein, 156 aa, Boselaphus tragocamelus
HFGKLEPKLSIIRNLNDQVLFINQGNQPVFEDMPDSDCPDNAPQTIFIIYMYKDSLTRGLAVTISVQCKKMSTLSCENKIVSFKEMNPPDNIDNEGSDIIFFQRSVPGHDDKIQFESSLYKGYFLACKKENDLFKLILKKQDDNGDKSVTFTVQNQ

SEQ ID NO: 1374 - protein, 157 aa, Capra hircus
HFGKLEPKLSIIRNLNDQVLFISQGNQPVFEDMPDSDCSDNAPQTIFIIYMYKDSLTRGLAVTISVQCKKMSTLSCENKIISFKEMNPPDNIDNEGSDIIFFQRSVPGHDDKIQFESSLYKGYFLACKKENDLFKLILKRQDDNRDKSVMFTVQNQN

SEQ ID NO: 1375 - protein, 157 aa, Sus scrofa
YFGKLEPKLSIIRNLNDQVLFINQGHQAVFEDMPDSDCSDNAPQTVFIIYMYKDSLTRGLAVTISVQCKKMSTLSCKNKTLSFKEMSPPDNIDDEGNDIIFFQRSVPGHDDKIQFESSLYKGYFLACKKENDLFKLILKEKDECGDKSIMFTVQNKN

SEQ ID NO: 1376 - protein, 157 aa, Felis catus
YFGKLEHKLSILRNLNDQVLFINQGDQPVFEDMPDSDCTDNAPRTEFIIYMYKDSLTRGLAVTISVNYKTMSTLSCENKIISFKEMSPPESINDEGNDIIFFQRSVPGHDDKIQFESSLYKGYFLACEKEKDLFKLILKKKDENGDKSIMFTVQNKN

SEQ ID NO: 1377 - protein, 156 aa, Canis lupus familiaris
YFGKLEPKLSIIRNLNDQVLFVNEGNQPVFEDMPDSDCTDNAPHTIFIIYMYKDSLTRGLAVTISVKYKTMSTLSCKNKTISFQKMSPPDSINDEGNDIIFFQRSVPGHDDKIQFESSLYKGHFLACKKENDLFKLILKDKDENGDKSIMFTVQNK

SEQ ID NO: 1378 - protein, 154 aa, Rattus norvegicus
HFGRLHCTTAVIRSINDQVLFVDKRNPPVFEDMPDIDRTANESQTRLIIYMYKDSEVRGLAVTLSVKDGRMSTLSCKNKIISFEEMNPPENIDDIKSDLIFFQKRVPGHNKMEFESSLYEGHFLACQKEDDAFKLVLKRKDENGDKSVMFTLTN

SEQ ID NO: 1379 - protein, 152 aa, Mus musculus
FGRLHCTTAVIRNINDQVLFVDKRQPVFEDMTDIDQSASEPQTRLIIYMYKDSEVRGLAVTLSVKDSKMSTLSCKNKIISFEEMDPPENIDDIQSDLIFFQKRVPGHNKMEFESSLYEGHFLACQKEDDAFKLILKKKDENGDKSVMFTLTN

SEQ ID NO: 1380 - protein, 444 aa, synthetic construct; identical to SEQ ID NO: 386
  source 1..444: note = XENP42477 Chain 1 - silentFv_H0_Fc(216)_IgG1_ISO(+RR)_C220S/PVA_/S267K/S364K/E3 57Q/H435R/Y436Y/K447del

SEQ ID NO: 1381 - protein, 392 aa, synthetic construct
  source 1..392: note = XENP42477 Chain 2 - mouse_IL18_3CS_K52D_(GGGGS)1_Fc(216)_IgG1_pI(-)_Isosteric_A _C220S/PVA_/S267K/L368D/K370S/K447del
NFGRLHSTTAVIRNINDQVLFVDKRQPVFEDMTDIDQSASEPQTRLIIYMYDDSEVRGLAVTLSVKDSKMSTLSSKNKIISFEEMDPPENIDDIQSDLIFFQKRVPGHNKMEFESSLYEGHFLASQKEDDAFKLILKKKDENGDKSVMFTLTNLHQSGGGGSEPKSSDKTHTCPPCPAPPVAGPSVFLFPPKPKDTLMISRTPEVTCVVVDVKHEDPEVKFNWYVDGVEVHNAKTKPREEEYNSTYRVVSVLTVLHQDWLNGKEYKCKVSNKALPAPIEKTISKAKGQPREPQVYTLPPSREEMTKNQVSLTCDVSGFYPSDIAVEWESDGQPENNYKTTPPVLDSDGSFFLYSKLTVDKSRWEQGDVFSCSVMHEALHNHYTQKSLSLSPG

SEQ ID NO: 1382 - protein, 214 aa, synthetic construct; identical to SEQ ID NO: 295
  source 1..214: note = XENP42477 Chain 3 - silentFv L0

SEQ ID NO: 1383 - protein, 444 aa, synthetic construct; identical to SEQ ID NO: 386
  source 1..444: note = XENP42417 Chain 1 - silentFv_H0_Fc(216)_IgG1_PVA_/S267K/S364K/E357Q/H435R/Y436F /K447del

SEQ ID NO: 1384 - protein, 392 aa, synthetic construct
  source 1..392: note = XENP42417 Chain 2 - mouse_IL18_3CS_A10C_N153C_(GGGGS)1_Fc(216)_IgG1_pI(-)_Isost eric_A_C220S/PVA_/S267K/L368D/K370S/K447del
NFGRLHSTTCVIRNINDQVLFVDKRQPVFEDMTDIDQSASEPQTRLIIYMYKDSEVRGLAVTLSVKDSKMSTLSSKNKIISFEEMDPPENIDDIQSDLIFFQKRVPGHNKMEFESSLYEGHFLASQKEDDAFKLILKKKDENGDKSVMFTLTCLHQSGGGGSEPKSSDKTHTCPPCPAPPVAGPSVFLFPPKPKDTLMISRTPEVTCVVVDVKHEDPEVKFNWYVDGVEVHNAKTKPREEEYNSTYRVVSVLTVLHQDWLNGKEYKCKVSNKALPAPIEKTISKAKGQPREPQVYTLPPSREEMTKNQVSLTCDVSGFYPSDIAVEWESDGQPENNYKTTPPVLDSDGSFFLYSKLTVDKSRWEQGDVFSCSVMHEALHNHYTQKSLSLSPG

SEQ ID NO: 1385 - protein, 214 aa, synthetic construct; identical to SEQ ID NO: 295
  source 1..214: note = XENP42417 Chain 3 - silentFv L0

SEQ ID NO: 1386 - protein, 444 aa, synthetic construct; identical to SEQ ID NO: 386
  source 1..444: note = XENP43089 Chain 1 - silentFv_H0_Fc(216)_IgG1_PVA_/S267K/S364K/E357Q/H435R/Y436F /K447del

SEQ ID NO: 1387 - protein, 392 aa, synthetic construct
  source 1..392: note = XENP43089 Chain 2 - mouse_IL18_3CS_A10C_E55R_N153C_(GGGGS)1_Fc(216)_IgG1_pI(-)_ Isosteric_A_C220S/PVA_/S267K/L368D/K370S/K447del
NFGRLHSTTCVIRNINDQVLFVDKRQPVFEDMTDIDQSASEPQTRLIIYMYKDSRVRGLAVTLSVKDSKMSTLSSKNKIISFEEMDPPENIDDIQSDLIFFQKRVPGHNKMEFESSLYEGHFLASQKEDDAFKLILKKKDENGDKSVMFTLTCLHQSGGGGSEPKSSDKTHTCPPCPAPPVAGPSVFLFPPKPKDTLMISRTPEVTCVVVDVKHEDPEVKFNWYVDGVEVHNAKTKPREEEYNSTYRVVSVLTVLHQDWLNGKEYKCKVSNKALPAPIEKTISKAKGQPREPQVYTLPPSREEMTKNQVSLTCDVSGFYPSDIAVEWESDGQPENNYKTTPPVLDSDGSFFLYSKLTVDKSRWEQGDVFSCSVMHEALHNHYTQKSLSLSPG

SEQ ID NO: 1388 - protein, 214 aa, synthetic construct; identical to SEQ ID NO: 295
  source 1..214: note = XENP43089 Chain 3 - silentFv L0

SEQ ID NO: 1389 - protein, 444 aa, synthetic construct; identical to SEQ ID NO: 386
  source 1..444: note = XENP43085 Chain 1 - silentFv_H0_Fc(216)_IgG1_PVA_/S267K/S364K/E357Q/H435R/Y436F /K447del

SEQ ID NO: 1390 - protein, 392 aa, synthetic construct
  source 1..392: note = XENP43085 Chain 2 - mouse_IL18_3CS_N1Y_A10C_N153C_(GGGGS)1_Fc(216)_IgG1_pI(-)_I sosteric_A_C220S/PVA_/S267K/L368D/K370S/K447del
YFGRLHSTTCVIRNINDQVLFVDKRQPVFEDMTDIDQSASEPQTRLIIYMYKDSEVRGLAVTLSVKDSKMSTLSSKNKIISFEEMDPPENIDDIQSDLIFFQKRVPGHNKMEFESSLYEGHFLASQKEDDAFKLILKKKDENGDKSVMFTLTCLHQSGGGGSEPKSSDKTHTCPPCPAPPVAGPSVFLFPPKPKDTLMISRTPEVTCVVVDVKHEDPEVKFNWYVDGVEVHNAKTKPREEEYNSTYRVVSVLTVLHQDWLNGKEYKCKVSNKALPAPIEKTISKAKGQPREPQVYTLPPSREEMTKNQVSLTCDVSGFYPSDIAVEWESDGQPENNYKTTPPVLDSDGSFFLYSKLTVDKSRWEQGDVFSCSVMHEALHNHYTQKSLSLSPG

SEQ ID NO: 1391 - protein, 214 aa, synthetic construct; identical to SEQ ID NO: 295
  source 1..214: note = XENP43085 Chain 3 - silentFv L0

SEQ ID NO: 1392 - protein, 444 aa, synthetic construct; identical to SEQ ID NO: 386
  source 1..444: note = XENP43092 Chain 1 - silentFv_H0_Fc(216)_IgG1_PVA_/S267K/S364K/E357Q/H435R/Y436F /K447del

SEQ ID NO: 1393 - protein, 392 aa, synthetic construct
  source 1..392: note = XENP43092 Chain 2 - mouse_IL18_3CS_A10C_L59K_N153C_(GGGGS)1_Fc(216)_IgG1_pI(-)_ Isosteric_A_C220S/PVA_/S267K/L368D/K370S/K447del
NFGRLHSTTCVIRNINDQVLFVDKRQPVFEDMTDIDQSASEPQTRLIIYMYKDSEVRGKAVTLSVKDSKMSTLSSKNKIISFEEMDPPENIDDIQSDLIFFQKRVPGHNKMEFESSLYEGHFLASQKEDDAFKLILKKKDENGDKSVMFTLTCLHQSGGGGSEPKSSDKTHTCPPCPAPPVAGPSVFLFPPKPKDTLMISRTPEVTCVVVDVKHEDPEVKFNWYVDGVEVHNAKTKPREEEYNSTYRVVSVLTVLHQDWLNGKEYKCKVSNKALPAPIEKTISKAKGQPREPQVYTLPPSREEMTKNQVSLTCDVSGFYPSDIAVEWESDGQPENNYKTTPPVLDSDGSFFLYSKLTVDKSRWEQGDVFSCSVMHEALHNHYTQKSLSLSPG

SEQ ID NO: 1394 - protein, 214 aa, synthetic construct; identical to SEQ ID NO: 295
  source 1..214: note = XENP43092 Chain 3 - silentFv L0

SEQ ID NO: 1395 - protein, 444 aa, synthetic construct; identical to SEQ ID NO: 386
  source 1..444: note = XENP43094 Chain 1 - silentFv_H0_Fc(216)_IgG1_PVA_/S267K/S364K/E357Q/H435R/Y436F /K447del

SEQ ID NO: 1396 - protein, 392 aa, synthetic construct
  source 1..392: note = XENP43094 Chain 2 - mouse_IL18_3CS_A10C_M50G_E55R_N153C_(GGGGS)1_Fc(216)_IgG1_p I(-)_Isosteric_A_C220S/PVA_/S267K/L368D/K370S/K447del
NFGRLHSTTCVIRNINDQVLFVDKRQPVFEDMTDIDQSASEPQTRLIIYGYKDSRVRGLAVTLSVKDSKMSTLSSKNKIISFEEMDPPENIDDIQSDLIFFQKRVPGHNKMEFESSLYEGHFLASQKEDDAFKLILKKKDENGDKSVMFTLTCLHQSGGGGSEPKSSDKTHTCPPCPAPPVAGPSVFLFPPKPKDTLMISRTPEVTCVVVDVKHEDPEVKFNWYVDGVEVHNAKTKPREEEYNSTYRVVSVLTVLHQDWLNGKEYKCKVSNKALPAPIEKTISKAKGQPREPQVYTLPPSREEMTKNQVSLTCDVSGFYPSDIAVEWESDGQPENNYKTTPPVLDSDGSFFLYSKLTVDKSRWEQGDVFSCSVMHEALHNHYTQKSLSLSPG

SEQ ID NO: 1397 - protein, 214 aa, synthetic construct; identical to SEQ ID NO: 295
  source 1..214: note = XENP43094 Chain 3 - silentFv L0

SEQ ID NO: 1398 - protein, 444 aa, synthetic construct; identical to SEQ ID NO: 386
  source 1..444: note = XENP43097 Chain 1 - silentFv_H0_Fc(216)_IgG1_PVA_/S267K/S364K/E357Q/H435R/Y436F /K447del

SEQ ID NO: 1399 - protein, 392 aa, synthetic construct
  source 1..392: note = XENP43097 Chain 2 - mouse_IL18_3CS_A10C_M50G_K52V_E55R_L59K_N153C_(GGGGS)1_Fc(2 16)_IgG1_pI(-)_Isosteric_A_C220S/PVA_/S267K/L368D/K370S/K44 7del
NFGRLHSTTCVIRNINDQVLFVDKRQPVFEDMTDIDQSASEPQTRLIIYGYVDSRVRGKAVTLSVKDSKMSTLSSKNKIISFEEMDPPENIDDIQSDLIFFQKRVPGHNKMEFESSLYEGHFLASQKEDDAFKLILKKKDENGDKSVMFTLTCLHQSGGGGSEPKSSDKTHTCPPCPAPPVAGPSVFLFPPKPKDTLMISRTPEVTCVVVDVKHEDPEVKFNWYVDGVEVHNAKTKPREEEYNSTYRVVSVLTVLHQDWLNGKEYKCKVSNKALPAPIEKTISKAKGQPREPQVYTLPPSREEMTKNQVSLTCDVSGFYPSDIAVEWESDGQPENNYKTTPPVLDSDGSFFLYSKLTVDKSRWEQGDVFSCSVMHEALHNHYTQKSLSLSPG

SEQ ID NO: 1400 - protein, 214 aa, synthetic construct; identical to SEQ ID NO: 295
  source 1..214: note = XENP43097 Chain 3 - silentFv L0

SEQ ID NO: 1401 - protein, 444 aa, synthetic construct; identical to SEQ ID NO: 386
  source 1..444: note = XENP43102 Chain 1 - silentFv_H0_Fc(216)_IgG1_PVA_/S267K/S364K/E357Q/H435R/Y436F /K447del

SEQ ID NO: 1402 - protein, 392 aa, synthetic construct
  source 1..392: note = XENP43102 Chain 2 - mouse_IL18_3CS_A10C_D34N_M50G_K52A_E55R_L59K_N153C_(GGGGS)1 _Fc(216)_IgG1_pI(-)_Isosteric_A_C220S/PVA_/S267K/L368D/K370 S/K447del
NFGRLHSTTCVIRNINDQVLFVDKRQPVFEDMTNIDQSASEPQTRLIIYGYADSRVRGKAVTLSVKDSKMSTLSSKNKIISFEEMDPPENIDDIQSDLIFFQKRVPGHNKMEFESSLYEGHFLASQKEDDAFKLILKKKDENGDKSVMFTLTCLHQSGGGGSEPKSSDKTHTCPPCPAPPVAGPSVFLFPPKPKDTLMISRTPEVTCVVVDVKHEDPEVKFNWYVDGVEVHNAKTKPREEEYNSTYRVVSVLTVLHQDWLNGKEYKCKVSNKALPAPIEKTISKAKGQPREPQVYTLPPSREEMTKNQVSLTCDVSGFYPSDIAVEWESDGQPENNYKTTPPVLDSDGSFFLYSKLTVDKSRWEQGDVFSCSVMHEALHNHYTQKSLSLSPG

SEQ ID NO: 1403 - protein, 214 aa, synthetic construct; identical to SEQ ID NO: 295
  source 1..214: note = XENP43102 Chain 3 - silentFv L0

SEQ ID NO: 1404 - protein, 444 aa, synthetic construct; identical to SEQ ID NO: 386
  source 1..444: note = XENP43103 Chain 1 - silentFv_H0_Fc(216)_IgG1_PVA_/S267K/S364K/E357Q/H435R/Y436F /K447del

SEQ ID NO: 1405 - protein, 392 aa, synthetic construct
  source 1..392: note = XENP43103 Chain 2 - mouse_IL18_3CS_A10C_E30Q_M50G_K52A_E55R_L59K_N153C_(GGGGS)1 _Fc(216)_IgG1_pI(-)_Isosteric_A_C220S/PVA_/S267K/L368D/K370 S/K447del
NFGRLHSTTCVIRNINDQVLFVDKRQPVFQDMTDIDQSASEPQTRLIIYGYADSRVRGKAVTLSVKDSKMSTLSSKNKIISFEEMDPPENIDDIQSDLIFFQKRVPGHNKMEFESSLYEGHFLASQKEDDAFKLILKKKDENGDKSVMFTLTCLHQSGGGGSEPKSSDKTHTCPPCPAPPVAGPSVFLFPPKPKDTLMISRTPEVTCVVVDVKHEDPEVKFNWYVDGVEVHNAKTKPREEEYNSTYRVVSVLTVLHQDWLNGKEYKCKVSNKALPAPIEKTISKAKGQPREPQVYTLPPSREEMTKNQVSLTCDVSGFYPSDIAVEWESDGQPENNYKTTPPVLDSDGSFFLYSKLTVDKSRWEQGDVFSCSVMHEALHNHYTQKSLSLSPG

SEQ ID NO: 1406 - protein, 214 aa, synthetic construct; identical to SEQ ID NO: 295
  source 1..214: note = XENP43103 Chain 3 - silentFv L0

SEQ ID NO: 1407 - protein, 444 aa, synthetic construct; identical to SEQ ID NO: 293
  source 1..444: note = XENP41186 Chain 1 - silentFv_H0_Fc(216)_IgG1_PVA_/S267K/S364K/E357Q/K447del

SEQ ID NO: 1408 - protein, 392 aa, synthetic construct
  source 1..392: note = XENP41186 Chain 2 - mouse_IL18_CS1_3CS_(GGGGS)1_Fc(216)_IgG1_pI(-)_Isosteric_A_ C220S/PVA_/S267K/L368D/K370S/K447del
NFGRLHSTTAVIRNINDQVLFVDKRQPVFEDMTDIDQSASEPQTRLIIYGYADSRVRGKAVTLSVKDSKMSTLSSKNKIISFEEMDPPENIDDIQSDLIFFQKRVPGHNKMEFESSLYEGHFLASQKEDDAFKLILKKKDENGDKSVMFTLTNLHQSGGGGSEPKSSDKTHTCPPCPAPPVAGPSVFLFPPKPKDTLMISRTPEVTCVVVDVKHEDPEVKFNWYVDGVEVHNAKTKPREEEYNSTYRVVSVLTVLHQDWLNGKEYKCKVSNKALPAPIEKTISKAKGQPREPQVYTLPPSREEMTKNQVSLTCDVSGFYPSDIAVEWESDGQPENNYKTTPPVLDSDGSFFLYSKLTVDKSRWEQGDVFSCSVMHEALHNHYTQKSLSLSPG

SEQ ID NO: 1409 - protein, 214 aa, synthetic construct; identical to SEQ ID NO: 295
  source 1..214: note = XENP41186 Chain 3 - silentFv L0

SEQ ID NO: 1410 - protein, 444 aa, synthetic construct; identical to SEQ ID NO: 293
  source 1..444: note = XENP42408 Chain 1 - silentFv_H0_Fc(216)_IgG1_PVA_/S267K/S364K/E357Q/K447del

SEQ ID NO: 1411 - protein, 392 aa, synthetic construct
  source 1..392: note = XENP42408 Chain 2 - mouse_IL18_3CS_A10C_I48C_(GGGGS)1_Fc(216)_IgG1_pI(-)_Isoste ric_A_C220S/PVA_/S267K/L368D/K370S/K447del
NFGRLHSTTCVIRNINDQVLFVDKRQPVFEDMTDIDQSASEPQTRLICYMYKDSEVRGLAVTLSVKDSKMSTLSSKNKIISFEEMDPPENIDDIQSDLIFFQKRVPGHNKMEFESSLYEGHFLASQKEDDAFKLILKKKDENGDKSVMFTLTNLHQSGGGGSEPKSSDKTHTCPPCPAPPVAGPSVFLFPPKPKDTLMISRTPEVTCVVVDVKHEDPEVKFNWYVDGVEVHNAKTKPREEEYNSTYRVVSVLTVLHQDWLNGKEYKCKVSNKALPAPIEKTISKAKGQPREPQVYTLPPSREEMTKNQVSLTCDVSGFYPSDIAVEWESDGQPENNYKTTPPVLDSDGSFFLYSKLTVDKSRWEQGDVFSCSVMHEALHNHYTQKSLSLSPG

SEQ ID NO: 1412 - protein, 214 aa, synthetic construct; identical to SEQ ID NO: 295
  source 1..214: note = XENP42408 Chain 3 - silentFv L0

SEQ ID NO: 1413 - protein, 444 aa, synthetic construct; identical to SEQ ID NO: 293
  source 1..444: note = XENP42411 Chain 1 - silentFv_H0_Fc(216)_IgG1_PVA_/S267K/S364K/E357Q/K447del

SEQ ID NO: 1414 - protein, 392 aa, synthetic construct
  source 1..392: note = XENP42411 Chain 2 - mouse_IL18_3CS_S7C_Y49C_(GGGGS)1_Fc(216)_IgG1_pI(-)_Isoster ic_A_C220S/PVA_/S267K/L368D/K370S/K447del
NFGRLHCTTAVIRNINDQVLFVDKRQPVFEDMTDIDQSASEPQTRLIICMYKDSEVRGLAVTLSVKDSKMSTLSSKNKIISFEEMDPPENIDDIQSDLIFFQKRVPGHNKMEFESSLYEGHFLASQKEDDAFKLILKKKDENGDKSVMFTLTNLHQSGGGGSEPKSSDKTHTCPPCPAPPVAGPSVFLFPPKPKDTLMISRTPEVTCVVVDVKHEDPEVKFNWYVDGVEVHNAKTKPREEEYNSTYRVVSVLTVLHQDWLNGKEYKCKVSNKALPAPIEKTISKAKGQPREPQVYTLPPSREEMTKNQVSLTCDVSGFYPSDIAVEWESDGQPENNYKTTPPVLDSDGSFFLYSKLTVDKSRWEQGDVFSCSVMHEALHNHYTQKSLSLSPG

SEQ ID NO: 1415 - protein, 214 aa, synthetic construct; identical to SEQ ID NO: 295
  source 1..214: note = XENP42411 Chain 3 - silentFv L0

SEQ ID NO: 1416 - protein, 444 aa, synthetic construct; identical to SEQ ID NO: 386
  source 1..444: note = XENP42413 Chain 1 - silentFv_H0_Fc(216)_IgG1_PVA_/S267K/S364K/E357Q/H435R/Y436F /K447del

SEQ ID NO: 1417 - protein, 392 aa, synthetic construct; identical to SEQ ID NO: 1411
  source 1..392: note = XENP42413 Chain 2 - mouse_IL18_3CS_A10C_I48C_(GGGGS)1_Fc(216)_IgG1_pI(-)_Isoste ric_A_C220S/PVA_/S267K/L368D/K370S/K447del

SEQ ID NO: 1418 - protein, 214 aa, synthetic construct; identical to SEQ ID NO: 295
  source 1..214: note = XENP42413 Chain 3 - silentFv L0

SEQ ID NO: 1419 - protein, 444 aa, synthetic construct; identical to SEQ ID NO: 386
  source 1..444: note = XENP42478 Chain 1 - silentFv_H0_Fc(216)_IgG1_ISO(+RR)_C220S/PVA_/S267K/S364K/E3 57Q/H435R/Y436Y/K447del

SEQ ID NO: 1420 - protein, 392 aa, synthetic construct
  source 1..392: note = XENP42478 Chain 2 - mouse_IL18_3CS_K52G_(GGGGS)1_Fc(216)_IgG1_pI(-)_Isosteric_A _C220S/PVA_/S267K/L368D/K370S/K447del
NFGRLHSTTAVIRNINDQVLFVDKRQPVFEDMTDIDQSASEPQTRLIIYMYGDSEVRGLAVTLSVKDSKMSTLSSKNKIISFEEMDPPENIDDIQSDLIFFQKRVPGHNKMEFESSLYEGHFLASQKEDDAFKLILKKKDENGDKSVMFTLTNLHQSGGGGSEPKSSDKTHTCPPCPAPPVAGPSVFLFPPKPKDTLMISRTPEVTCVVVDVKHEDPEVKFNWYVDGVEVHNAKTKPREEEYNSTYRVVSVLTVLHQDWLNGKEYKCKVSNKALPAPIEKTISKAKGQPREPQVYTLPPSREEMTKNQVSLTCDVSGFYPSDIAVEWESDGQPENNYKTTPPVLDSDGSFFLYSKLTVDKSRWEQGDVFSCSVMHEALHNHYTQKSLSLSPG

SEQ ID NO: 1421 - protein, 214 aa, synthetic construct; identical to SEQ ID NO: 295
  source 1..214: note = XENP42478 Chain 3 - silentFv L0

SEQ ID NO: 1422 - protein, 444 aa, synthetic construct; identical to SEQ ID NO: 386
  source 1..444: note = XENP42479 Chain 1 - silentFv_H0_Fc(216)_IgG1_ISO(+RR)_C220S/PVA_/S267K/S364K/E3 57Q/H435R/Y436Y/K447del

SEQ ID NO: 1423 - protein, 392 aa, synthetic construct
  source 1..392: note = XENP42479 Chain 2 - mouse_IL18_3CS_K52S_(GGGGS)1_Fc(216)_IgG1_pI(-)_Isosteric_A _C220S/PVA_/S267K/L368D/K370S/K447del
NFGRLHSTTAVIRNINDQVLFVDKRQPVFEDMTDIDQSASEPQTRLIIYMYSDSEVRGLAVTLSVKDSKMSTLSSKNKIISFEEMDPPENIDDIQSDLIFFQKRVPGHNKMEFESSLYEGHFLASQKEDDAFKLILKKKDENGDKSVMFTLTNLHQSGGGGSEPKSSDKTHTCPPCPAPPVAGPSVFLFPPKPKDTLMISRTPEVTCVVVDVKHEDPEVKFNWYVDGVEVHNAKTKPREEEYNSTYRVVSVLTVLHQDWLNGKEYKCKVSNKALPAPIEKTISKAKGQPREPQVYTLPPSREEMTKNQVSLTCDVSGFYPSDIAVEWESDGQPENNYKTTPPVLDSDGSFFLYSKLTVDKSRWEQGDVFSCSVMHEALHNHYTQKSLSLSPG

SEQ ID NO: 1424 - protein, 214 aa, synthetic construct; identical to SEQ ID NO: 295
  source 1..214: note = XENP42479 Chain 3 - silentFv L0

SEQ ID NO: 1425 - protein, 444 aa, synthetic construct; identical to SEQ ID NO: 386
  source 1..444: note = XENP42480 Chain 1 - silentFv_H0_Fc(216)_IgG1_ISO(+RR)_C220S/PVA_/S267K/S364K/E3 57Q/H435R/Y436Y/K447del

SEQ ID NO: 1426 - protein, 392 aa, synthetic construct
  source 1..392: note = XENP42480 Chain 2 - mouse_IL18_3CS_N109T_(GGGGS)1_Fc(216)_IgG1_pI(-)_Isosteric_ A_C220S/PVA_/S267K/L368D/K370S/K447del
NFGRLHSTTAVIRNINDQVLFVDKRQPVFEDMTDIDQSASEPQTRLIIYMYKDSEVRGLAVTLSVKDSKMSTLSSKNKIISFEEMDPPENIDDIQSDLIFFQKRVPGHTKMEFESSLYEGHFLASQKEDDAFKLILKKKDENGDKSVMFTLTNLHQSGGGGSEPKSSDKTHTCPPCPAPPVAGPSVFLFPPKPKDTLMISRTPEVTCVVVDVKHEDPEVKFNWYVDGVEVHNAKTKPREEEYNSTYRVVSVLTVLHQDWLNGKEYKCKVSNKALPAPIEKTISKAKGQPREPQVYTLPPSREEMTKNQVSLTCDVSGFYPSDIAVEWESDGQPENNYKTTPPVLDSDGSFFLYSKLTVDKSRWEQGDVFSCSVMHEALHNHYTQKSLSLSPG

SEQ ID NO: 1427 - protein, 214 aa, synthetic construct; identical to SEQ ID NO: 295
  source 1..214: note = XENP42480 Chain 3 - silentFv L0

SEQ ID NO: 1428 - protein, 444 aa, synthetic construct; identical to SEQ ID NO: 386
  source 1..444: note = XENP42486 Chain 1 - silentFv_H0_Fc(216)_IgG1_ISO(+RR)_C220S/PVA_/S267K/S364K/E3 57Q/H435R/Y436Y/K447del

SEQ ID NO: 1429 - protein, 392 aa, synthetic construct
  source 1..392: note = XENP42486 Chain 2 - mouse_IL18_3CS_K52Q_(GGGGS)1_Fc(216)_IgG1_pI(-)_Isosteric_A _C220S/PVA_/S267K/L368D/K370S/K447del
NFGRLHSTTAVIRNINDQVLFVDKRQPVFEDMTDIDQSASEPQTRLIIYMYQDSEVRGLAVTLSVKDSKMSTLSSKNKIISFEEMDPPENIDDIQSDLIFFQKRVPGHNKMEFESSLYEGHFLASQKEDDAFKLILKKKDENGDKSVMFTLTNLHQSGGGGSEPKSSDKTHTCPPCPAPPVAGPSVFLFPPKPKDTLMISRTPEVTCVVVDVKHEDPEVKFNWYVDGVEVHNAKTKPREEEYNSTYRVVSVLTVLHQDWLNGKEYKCKVSNKALPAPIEKTISKAKGQPREPQVYTLPPSREEMTKNQVSLTCDVSGFYPSDIAVEWESDGQPENNYKTTPPVLDSDGSFFLYSKLTVDKSRWEQGDVFSCSVMHEALHNHYTQKSLSLSPG

SEQ ID NO: 1430 - protein, 214 aa, synthetic construct; identical to SEQ ID NO: 295
  source 1..214: note = XENP42486 Chain 3 - silentFv L0

SEQ ID NO: 1431 - protein, 444 aa, synthetic construct; identical to SEQ ID NO: 386
  source 1..444: note = XENP42481 Chain 1 - silentFv_H0_Fc(216)_IgG1_ISO(+RR)_C220S/PVA_/S267K/S364K/E3 57Q/H435R/Y436Y/K447del

SEQ ID NO: 1432 - protein, 392 aa, synthetic construct
  source 1..392: note = XENP42481 Chain 2 - mouse_IL18_3CS_N109S_(GGGGS)1_Fc(216)_IgG1_pI(-)_Isosteric_ A_C220S/PVA_/S267K/L368D/K370S/K447del
NFGRLHSTTAVIRNINDQVLFVDKRQPVFEDMTDIDQSASEPQTRLIIYMYKDSEVRGLAVTLSVKDSKMSTLSSKNKIISFEEMDPPENIDDIQSDLIFFQKRVPGHSKMEFESSLYEGHFLASQKEDDAFKLILKKKDENGDKSVMFTLTNLHQSGGGGSEPKSSDKTHTCPPCPAPPVAGPSVFLFPPKPKDTLMISRTPEVTCVVVDVKHEDPEVKFNWYVDGVEVHNAKTKPREEEYNSTYRVVSVLTVLHQDWLNGKEYKCKVSNKALPAPIEKTISKAKGQPREPQVYTLPPSREEMTKNQVSLTCDVSGFYPSDIAVEWESDGQPENNYKTTPPVLDSDGSFFLYSKLTVDKSRWEQGDVFSCSVMHEALHNHYTQKSLSLSPG

SEQ ID NO: 1433 - protein, 214 aa, synthetic construct; identical to SEQ ID NO: 295
  source 1..214: note = XENP42481 Chain 3 - silentFv L0

SEQ ID NO: 1434 - protein, 444 aa, synthetic construct; identical to SEQ ID NO: 386
  source 1..444: note = XENP42485 Chain 1 - silentFv_H0_Fc(216)_IgG1_ISO(+RR)_C220S/PVA_/S267K/S364K/E3 57Q/H435R/Y436Y/K447del

SEQ ID NO: 1435 - protein, 392 aa, synthetic construct
  source 1..392: note = XENP42485 Chain 2 - mouse_IL18_3CS_K52T_(GGGGS)1_Fc(216)_IgG1_pI(-)_Isosteric_A _C220S/PVA_/S267K/L368D/K370S/K447del
NFGRLHSTTAVIRNINDQVLFVDKRQPVFEDMTDIDQSASEPQTRLIIYMYTDSEVRGLAVTLSVKDSKMSTLSSKNKIISFEEMDPPENIDDIQSDLIFFQKRVPGHNKMEFESSLYEGHFLASQKEDDAFKLILKKKDENGDKSVMFTLTNLHQSGGGGSEPKSSDKTHTCPPCPAPPVAGPSVFLFPPKPKDTLMISRTPEVTCVVVDVKHEDPEVKFNWYVDGVEVHNAKTKPREEEYNSTYRVVSVLTVLHQDWLNGKEYKCKVSNKALPAPIEKTISKAKGQPREPQVYTLPPSREEMTKNQVSLTCDVSGFYPSDIAVEWESDGQPENNYKTTPPVLDSDGSFFLYSKLTVDKSRWEQGDVFSCSVMHEALHNHYTQKSLSLSPG

SEQ ID NO: 1436 - protein, 214 aa, synthetic construct; identical to SEQ ID NO: 295
  source 1..214: note = XENP42485 Chain 3 - silentFv L0

SEQ ID NO: 1437 - protein, 444 aa, synthetic construct; identical to SEQ ID NO: 386
  source 1..444: note = XENP42415 Chain 1 - silentFv_H0_Fc(216)_IgG1_PVA_/S267K/S364K/E357Q/H435R/Y436F /K447del

SEQ ID NO: 1438 - protein, 392 aa, synthetic construct
  source 1..392: note = XENP42415 Chain 2 - mouse_IL18_3CS_T62C_P87C_(GGGGS)1_Fc(216)_IgG1_pI(-)_Isoste ric_A_C220S/PVA_/S267K/L368D/K370S/K447del
NFGRLHSTTAVIRNINDQVLFVDKRQPVFEDMTDIDQSASEPQTRLIIYMYKDSEVRGLAVCLSVKDSKMSTLSSKNKIISFEEMDCPENIDDIQSDLIFFQKRVPGHNKMEFESSLYEGHFLASQKEDDAFKLILKKKDENGDKSVMFTLTNLHQSGGGGSEPKSSDKTHTCPPCPAPPVAGPSVFLFPPKPKDTLMISRTPEVTCVVVDVKHEDPEVKFNWYVDGVEVHNAKTKPREEEYNSTYRVVSVLTVLHQDWLNGKEYKCKVSNKALPAPIEKTISKAKGQPREPQVYTLPPSREEMTKNQVSLTCDVSGFYPSDIAVEWESDGQPENNYKTTPPVLDSDGSFFLYSKLTVDKSRWEQGDVFSCSVMHEALHNHYTQKSLSLSPG

SEQ ID NO: 1439 - protein, 214 aa, synthetic construct; identical to SEQ ID NO: 295
  source 1..214: note = XENP42415 Chain 3 - silentFv L0

SEQ ID NO: 1440 - protein, 444 aa, synthetic construct; identical to SEQ ID NO: 386
  source 1..444: note = XENP42488 Chain 1 - silentFv_H0_Fc(216)_IgG1_ISO(+RR)_C220S/PVA_/S267K/S364K/E3 57Q/H435R/Y436Y/K447del

SEQ ID NO: 1441 - protein, 392 aa, synthetic construct
  source 1..392: note = XENP42488 Chain 2 - mouse_IL18_3CS_K52E_(GGGGS)1_Fc(216)_IgG1_pI(-)_Isosteric_A _C220S/PVA_/S267K/L368D/K370S/K447del
NFGRLHSTTAVIRNINDQVLFVDKRQPVFEDMTDIDQSASEPQTRLIIYMYEDSEVRGLAVTLSVKDSKMSTLSSKNKIISFEEMDPPENIDDIQSDLIFFQKRVPGHNKMEFESSLYEGHFLASQKEDDAFKLILKKKDENGDKSVMFTLTNLHQSGGGGSEPKSSDKTHTCPPCPAPPVAGPSVFLFPPKPKDTLMISRTPEVTCVVVDVKHEDPEVKFNWYVDGVEVHNAKTKPREEEYNSTYRVVSVLTVLHQDWLNGKEYKCKVSNKALPAPIEKTISKAKGQPREPQVYTLPPSREEMTKNQVSLTCDVSGFYPSDIAVEWESDGQPENNYKTTPPVLDSDGSFFLYSKLTVDKSRWEQGDVFSCSVMHEALHNHYTQKSLSLSPG

SEQ ID NO: 1442 - protein, 214 aa, synthetic construct; identical to SEQ ID NO: 295
  source 1..214: note = XENP42488 Chain 3 - silentFv L0

SEQ ID NO: 1443 - protein, 444 aa, synthetic construct; identical to SEQ ID NO: 386
  source 1..444: note = XENP42414 Chain 1 - silentFv_H0_Fc(216)_IgG1_PVA_/S267K/S364K/E357Q/H435R/Y436F /K447del

SEQ ID NO: 1444 - protein, 392 aa, synthetic construct
  source 1..392: note = XENP42414 Chain 2 - mouse_IL18_3CS_I15C_K145C_(GGGGS)1_Fc(216)_IgG1_pI(-)_Isost eric_A_C220S/PVA_/S267K/L368D/K370S/K447del
NFGRLHSTTAVIRNCNDQVLFVDKRQPVFEDMTDIDQSASEPQTRLIIYMYKDSEVRGLAVTLSVKDSKMSTLSSKNKIISFEEMDPPENIDDIQSDLIFFQKRVPGHNKMEFESSLYEGHFLASQKEDDAFKLILKKKDENGDCSVMFTLTNLHQSGGGGSEPKSSDKTHTCPPCPAPPVAGPSVFLFPPKPKDTLMISRTPEVTCVVVDVKHEDPEVKFNWYVDGVEVHNAKTKPREEEYNSTYRVVSVLTVLHQDWLNGKEYKCKVSNKALPAPIEKTISKAKGQPREPQVYTLPPSREEMTKNQVSLTCDVSGFYPSDIAVEWESDGQPENNYKTTPPVLDSDGSFFLYSKLTVDKSRWEQGDVFSCSVMHEALHNHYTQKSLSLSPG

SEQ ID NO: 1445 - protein, 214 aa, synthetic construct; identical to SEQ ID NO: 295
  source 1..214: note = XENP42414 Chain 3 - silentFv L0

SEQ ID NO: 1446 - protein, 444 aa, synthetic construct; identical to SEQ ID NO: 386
  source 1..444: note = XENP42476 Chain 1 - silentFv_H0_Fc(216)_IgG1_ISO(+RR)_C220S/PVA_/S267K/S364K/E3 57Q/H435R/Y436Y/K447del

SEQ ID NO: 1447 - protein, 392 aa, synthetic construct
  source 1..392: note = XENP42476 Chain 2 - mouse_IL18_3CS_H6Y_(GGGGS)1_Fc(216)_IgG1_pI(-)_Isosteric_A_ C220S/PVA_/S267K/L368D/K370S/K447del
NFGRLYSTTAVIRNINDQVLFVDKRQPVFEDMTDIDQSASEPQTRLIIYMYKDSEVRGLAVTLSVKDSKMSTLSSKNKIISFEEMDPPENIDDIQSDLIFFQKRVPGHNKMEFESSLYEGHFLASQKEDDAFKLILKKKDENGDKSVMFTLTNLHQSGGGGSEPKSSDKTHTCPPCPAPPVAGPSVFLFPPKPKDTLMISRTPEVTCVVVDVKHEDPEVKFNWYVDGVEVHNAKTKPREEEYNSTYRVVSVLTVLHQDWLNGKEYKCKVSNKALPAPIEKTISKAKGQPREPQVYTLPPSREEMTKNQVSLTCDVSGFYPSDIAVEWESDGQPENNYKTTPPVLDSDGSFFLYSKLTVDKSRWEQGDVFSCSVMHEALHNHYTQKSLSLSPG

SEQ ID NO: 1448 - protein, 214 aa, synthetic construct; identical to SEQ ID NO: 295
  source 1..214: note = XENP42476 Chain 3 - silentFv L0

SEQ ID NO: 1449 - protein, 444 aa, synthetic construct; identical to SEQ ID NO: 386
  source 1..444: note = XENP42416 Chain 1 - silentFv_H0_Fc(216)_IgG1_PVA_/S267K/S364K/E357Q/H435R/Y436F /K447del

SEQ ID NO: 1450 - protein, 392 aa, synthetic construct; identical to SEQ ID NO: 1414
  source 1..392: note = XENP42416 Chain 2 - mouse_IL18_3CS_S7C_Y49C_(GGGGS)1_Fc(216)_IgG1_pI(-)_Isoster ic_A_C220S/PVA_/S267K/L368D/K370S/K447del

SEQ ID NO: 1451 - protein, 214 aa, synthetic construct; identical to SEQ ID NO: 295
  source 1..214: note = XENP42416 Chain 3 - silentFv L0

SEQ ID NO: 1452 - protein, 444 aa, synthetic construct; identical to SEQ ID NO: 386
  source 1..444: note = XENP42482 Chain 1 - silentFv_H0_Fc(216)_IgG1_ISO(+RR)_C220S/PVA_/S267K/S364K/E3 57Q/H435R/Y436Y/K447del

SEQ ID NO: 1453 - protein, 392 aa, synthetic construct
  source 1..392: note = XENP42482 Chain 2 - mouse_IL18_3CS_N109E_(GGGGS)1_Fc(216)_IgG1_pI(-)_Isosteric_ A_C220S/PVA_/S267K/L368D/K370S/K447del
NFGRLHSTTAVIRNINDQVLFVDKRQPVFEDMTDIDQSASEPQTRLIIYMYKDSEVRGLAVTLSVKDSKMSTLSSKNKIISFEEMDPPENIDDIQSDLIFFQKRVPGHEKMEFESSLYEGHFLASQKEDDAFKLILKKKDENGDKSVMFTLTNLHQSGGGGSEPKSSDKTHTCPPCPAPPVAGPSVFLFPPKPKDTLMISRTPEVTCVVVDVKHEDPEVKFNWYVDGVEVHNAKTKPREEEYNSTYRVVSVLTVLHQDWLNGKEYKCKVSNKALPAPIEKTISKAKGQPREPQVYTLPPSREEMTKNQVSLTCDVSGFYPSDIAVEWESDGQPENNYKTTPPVLDSDGSFFLYSKLTVDKSRWEQGDVFSCSVMHEALHNHYTQKSLSLSPG

SEQ ID NO: 1454 - protein, 214 aa, synthetic construct; identical to SEQ ID NO: 295
  source 1..214: note = XENP42482 Chain 3 - silentFv L0

SEQ ID NO: 1455 - protein, 444 aa, synthetic construct; identical to SEQ ID NO: 293
  source 1..444: note = XENP42410 Chain 1 - silentFv_H0_Fc(216)_IgG1_PVA_/S267K/S364K/E357Q/K447del

SEQ ID NO: 1456 - protein, 392 aa, synthetic construct; identical to SEQ ID NO: 1438
  source 1..392: note = XENP42410 Chain 2 - mouse_IL18_3CS_T62C_P87C_(GGGGS)1_Fc(216)_IgG1_pI(-)_Isoste ric_A_C220S/PVA_/S267K/L368D/K370S/K447del

SEQ ID NO: 1457 - protein, 214 aa, synthetic construct; identical to SEQ ID NO: 295
  source 1..214: note = XENP42410 Chain 3 - silentFv L0

SEQ ID NO: 1458 - protein, 444 aa, synthetic construct; identical to SEQ ID NO: 293
  source 1..444: note = XENP42412 Chain 1 - silentFv_H0_Fc(216)_IgG1_PVA_/S267K/S364K/E357Q/K447del

SEQ ID NO: 1459 - protein, 392 aa, synthetic construct; identical to SEQ ID NO: 1384
  source 1..392: note = XENP42412 Chain 2 - mouse_IL18_3CS_A10C_N153C_(GGGGS)1_Fc(216)_IgG1_pI(-)_Isost eric_A_C220S/PVA_/S267K/L368D/K370S/K447del

SEQ ID NO: 1460 - protein, 214 aa, synthetic construct; identical to SEQ ID NO: 295
  source 1..214: note = XENP42412 Chain 3 - silentFv L0

SEQ ID NO: 1461 - protein, 444 aa, synthetic construct; identical to SEQ ID NO: 293
  source 1..444: note = XENP42409 Chain 1 - silentFv_H0_Fc(216)_IgG1_PVA_/S267K/S364K/E357Q/K447del

SEQ ID NO: 1462 - protein, 392 aa, synthetic construct; identical to SEQ ID NO: 1444
  source 1..392: note = XENP42409 Chain 2 - mouse_IL18_3CS_I15C_K145C_(GGGGS)1_Fc(216)_IgG1_pI(-)_Isost eric_A_C220S/PVA_/S267K/L368D/K370S/K447del

SEQ ID NO: 1463 - protein, 214 aa, synthetic construct; identical to SEQ ID NO: 295
  source 1..214: note = XENP42409 Chain 3 - silentFv L0

SEQ ID NO: 1464 - protein, 444 aa, synthetic construct; identical to SEQ ID NO: 386
  source 1..444: note = XENP43088 Chain 1 - silentFv_H0_Fc(216)_IgG1_PVA_/S267K/S364K/E357Q/H435R/Y436F /K447del

SEQ ID NO: 1465 - protein, 392 aa, synthetic construct
  source 1..392: note = XENP43088 Chain 2 - mouse_IL18_3CS_A10C_M50V_N153C_(GGGGS)1_Fc(216)_IgG1_pI(-)_ Isosteric_A_C220S/PVA_/S267K/L368D/K370S/K447del
NFGRLHSTTCVIRNINDQVLFVDKRQPVFEDMTDIDQSASEPQTRLIIYVYKDSEVRGLAVTLSVKDSKMSTLSSKNKIISFEEMDPPENIDDIQSDLIFFQKRVPGHNKMEFESSLYEGHFLASQKEDDAFKLILKKKDENGDKSVMFTLTCLHQSGGGGSEPKSSDKTHTCPPCPAPPVAGPSVFLFPPKPKDTLMISRTPEVTCVVVDVKHEDPEVKFNWYVDGVEVHNAKTKPREEEYNSTYRVVSVLTVLHQDWLNGKEYKCKVSNKALPAPIEKTISKAKGQPREPQVYTLPPSREEMTKNQVSLTCDVSGFYPSDIAVEWESDGQPENNYKTTPPVLDSDGSFFLYSKLTVDKSRWEQGDVFSCSVMHEALHNHYTQKSLSLSPG

SEQ ID NO: 1466 - protein, 214 aa, synthetic construct; identical to SEQ ID NO: 295
  source 1..214: note = XENP43088 Chain 3 - silentFv L0

SEQ ID NO: 1467 - protein, 444 aa, synthetic construct; identical to SEQ ID NO: 386
  source 1..444: note = XENP43084 Chain 1 - silentFv_H0_Fc(216)_IgG1_PVA_/S267K/S364K/E357Q/H435R/Y436F /K447del

SEQ ID NO: 1468 - protein, 392 aa, synthetic construct
  source 1..392: note = XENP43084 Chain 2 - mouse_IL18_3CS_N1H_A10C_N153C_(GGGGS)1_Fc(216)_IgG1_pI(-)_I sosteric_A_C220S/PVA_/S267K/L368D/K370S/K447del
HFGRLHSTTCVIRNINDQVLFVDKRQPVFEDMTDIDQSASEPQTRLIIYMYKDSEVRGLAVTLSVKDSKMSTLSSKNKIISFEEMDPPENIDDIQSDLIFFQKRVPGHNKMEFESSLYEGHFLASQKEDDAFKLILKKKDENGDKSVMFTLTCLHQSGGGGSEPKSSDKTHTCPPCPAPPVAGPSVFLFPPKPKDTLMISRTPEVTCVVVDVKHEDPEVKFNWYVDGVEVHNAKTKPREEEYNSTYRVVSVLTVLHQDWLNGKEYKCKVSNKALPAPIEKTISKAKGQPREPQVYTLPPSREEMTKNQVSLTCDVSGFYPSDIAVEWESDGQPENNYKTTPPVLDSDGSFFLYSKLTVDKSRWEQGDVFSCSVMHEALHNHYTQKSLSLSPG

SEQ ID NO: 1469 - protein, 214 aa, synthetic construct; identical to SEQ ID NO: 295
  source 1..214: note = XENP43084 Chain 3 - silentFv L0

SEQ ID NO: 1470 - protein, 444 aa, synthetic construct; identical to SEQ ID NO: 386
  source 1..444: note = XENP42474 Chain 1 - silentFv_H0_Fc(216)_IgG1_ISO(+RR)_C220S/PVA_/S267K/S364K/E3 57Q/H435R/Y436Y/K447del

SEQ ID NO: 1471 - protein, 392 aa, synthetic construct
  source 1..392: note = XENP42474 Chain 2 - mouse_IL18_3CS_H6E_(GGGGS)1_Fc(216)_IgG1_pI(-)_Isosteric_A_ C220S/PVA_/S267K/L368D/K370S/K447del
NFGRLESTTAVIRNINDQVLFVDKRQPVFEDMTDIDQSASEPQTRLIIYMYKDSEVRGLAVTLSVKDSKMSTLSSKNKIISFEEMDPPENIDDIQSDLIFFQKRVPGHNKMEFESSLYEGHFLASQKEDDAFKLILKKKDENGDKSVMFTLTNLHQSGGGGSEPKSSDKTHTCPPCPAPPVAGPSVFLFPPKPKDTLMISRTPEVTCVVVDVKHEDPEVKFNWYVDGVEVHNAKTKPREEEYNSTYRVVSVLTVLHQDWLNGKEYKCKVSNKALPAPIEKTISKAKGQPREPQVYTLPPSREEMTKNQVSLTCDVSGFYPSDIAVEWESDGQPENNYKTTPPVLDSDGSFFLYSKLTVDKSRWEQGDVFSCSVMHEALHNHYTQKSLSLSPG

SEQ ID NO: 1472 - protein, 214 aa, synthetic construct; identical to SEQ ID NO: 295
  source 1..214: note = XENP42474 Chain 3 - silentFv L0

SEQ ID NO: 1473 - protein, 444 aa, synthetic construct; identical to SEQ ID NO: 386
  source 1..444: note = XENP42475 Chain 1 - silentFv_H0_Fc(216)_IgG1_ISO(+RR)_C220S/PVA_/S267K/S364K/E3 57Q/H435R/Y436Y/K447del

SEQ ID NO: 1474 - protein, 392 aa, synthetic construct
  source 1..392: note = XENP42475 Chain 2 - mouse_IL18_3CS_H6F_(GGGGS)1_Fc(216)_IgG1_pI(-)_Isosteric_A_ C220S/PVA_/S267K/L368D/K370S/K447del
NFGRLFSTTAVIRNINDQVLFVDKRQPVFEDMTDIDQSASEPQTRLIIYMYKDSEVRGLAVTLSVKDSKMSTLSSKNKIISFEEMDPPENIDDIQSDLIFFQKRVPGHNKMEFESSLYEGHFLASQKEDDAFKLILKKKDENGDKSVMFTLTNLHQSGGGGSEPKSSDKTHTCPPCPAPPVAGPSVFLFPPKPKDTLMISRTPEVTCVVVDVKHEDPEVKFNWYVDGVEVHNAKTKPREEEYNSTYRVVSVLTVLHQDWLNGKEYKCKVSNKALPAPIEKTISKAKGQPREPQVYTLPPSREEMTKNQVSLTCDVSGFYPSDIAVEWESDGQPENNYKTTPPVLDSDGSFFLYSKLTVDKSRWEQGDVFSCSVMHEALHNHYTQKSLSLSPG

SEQ ID NO: 1475 - protein, 214 aa, synthetic construct; identical to SEQ ID NO: 295
  source 1..214: note = XENP42475 Chain 3 - silentFv L0

SEQ ID NO: 1476 - protein, 444 aa, synthetic construct; identical to SEQ ID NO: 386
  source 1..444: note = XENP42483 Chain 1 - silentFv_H0_Fc(216)_IgG1_ISO(+RR)_C220S/PVA_/S267K/S364K/E3 57Q/H435R/Y436Y/K447del

SEQ ID NO: 1477 - protein, 392 aa, synthetic construct
  source 1..392: note = XENP42483 Chain 2 - mouse_IL18_3CS_N109D_(GGGGS)1_Fc(216)_IgG1_pI(-)_Isosteric_ A_C220S/PVA_/S267K/L368D/K370S/K447del
NFGRLHSTTAVIRNINDQVLFVDKRQPVFEDMTDIDQSASEPQTRLIIYMYKDSEVRGLAVTLSVKDSKMSTLSSKNKIISFEEMDPPENIDDIQSDLIFFQKRVPGHDKMEFESSLYEGHFLASQKEDDAFKLILKKKDENGDKSVMFTLTNLHQSGGGGSEPKSSDKTHTCPPCPAPPVAGPSVFLFPPKPKDTLMISRTPEVTCVVVDVKHEDPEVKFNWYVDGVEVHNAKTKPREEEYNSTYRVVSVLTVLHQDWLNGKEYKCKVSNKALPAPIEKTISKAKGQPREPQVYTLPPSREEMTKNQVSLTCDVSGFYPSDIAVEWESDGQPENNYKTTPPVLDSDGSFFLYSKLTVDKSRWEQGDVFSCSVMHEALHNHYTQKSLSLSPG

SEQ ID NO: 1478 - protein, 214 aa, synthetic construct; identical to SEQ ID NO: 295
  source 1..214: note = XENP42483 Chain 3 - silentFv L0

SEQ ID NO: 1479 - protein, 444 aa, synthetic construct; identical to SEQ ID NO: 386
  source 1..444: note = XENP42490 Chain 1 - silentFv_H0_Fc(216)_IgG1_ISO(+RR)_C220S/PVA_/S267K/S364K/E3 57Q/H435R/Y436Y/K447del

SEQ ID NO: 1480 - protein, 392 aa, synthetic construct
  source 1..392: note = XENP42490 Chain 2 - mouse_IL18_3CS_D34N_(GGGGS)1_Fc(216)_IgG1_pI(-)_Isosteric_A _C220S/PVA_/S267K/L368D/K370S/K447del
NFGRLHSTTAVIRNINDQVLFVDKRQPVFEDMTNIDQSASEPQTRLIIYMYKDSEVRGLAVTLSVKDSKMSTLSSKNKIISFEEMDPPENIDDIQSDLIFFQKRVPGHNKMEFESSLYEGHFLASQKEDDAFKLILKKKDENGDKSVMFTLTNLHQSGGGGSEPKSSDKTHTCPPCPAPPVAGPSVFLFPPKPKDTLMISRTPEVTCVVVDVKHEDPEVKFNWYVDGVEVHNAKTKPREEEYNSTYRVVSVLTVLHQDWLNGKEYKCKVSNKALPAPIEKTISKAKGQPREPQVYTLPPSREEMTKNQVSLTCDVSGFYPSDIAVEWESDGQPENNYKTTPPVLDSDGSFFLYSKLTVDKSRWEQGDVFSCSVMHEALHNHYTQKSLSLSPG

SEQ ID NO: 1481 - protein, 214 aa, synthetic construct; identical to SEQ ID NO: 295
  source 1..214: note = XENP42490 Chain 3 - silentFv L0

SEQ ID NO: 1482 - protein, 444 aa, synthetic construct; identical to SEQ ID NO: 386
  source 1..444: note = XENP42489 Chain 1 - silentFv_H0_Fc(216)_IgG1_ISO(+RR)_C220S/PVA_/S267K/S364K/E3 57Q/H435R/Y436Y/K447del

SEQ ID NO: 1483 - protein, 392 aa, synthetic construct
  source 1..392: note = XENP42489 Chain 2 - mouse_IL18_3CS_E30Q_(GGGGS)1_Fc(216)_IgG1_pI(-)_Isosteric_A _C220S/PVA_/S267K/L368D/K370S/K447del
NFGRLHSTTAVIRNINDQVLFVDKRQPVFQDMTDIDQSASEPQTRLIIYMYKDSEVRGLAVTLSVKDSKMSTLSSKNKIISFEEMDPPENIDDIQSDLIFFQKRVPGHNKMEFESSLYEGHFLASQKEDDAFKLILKKKDENGDKSVMFTLTNLHQSGGGGSEPKSSDKTHTCPPCPAPPVAGPSVFLFPPKPKDTLMISRTPEVTCVVVDVKHEDPEVKFNWYVDGVEVHNAKTKPREEEYNSTYRVVSVLTVLHQDWLNGKEYKCKVSNKALPAPIEKTISKAKGQPREPQVYTLPPSREEMTKNQVSLTCDVSGFYPSDIAVEWESDGQPENNYKTTPPVLDSDGSFFLYSKLTVDKSRWEQGDVFSCSVMHEALHNHYTQKSLSLSPG

SEQ ID NO: 1484 - protein, 214 aa, synthetic construct; identical to SEQ ID NO: 295
  source 1..214: note = XENP42489 Chain 3 - silentFv L0

SEQ ID NO: 1485 - protein, 444 aa, synthetic construct; identical to SEQ ID NO: 386
  source 1..444: note = XENP42484 Chain 1 - silentFv_H0_Fc(216)_IgG1_ISO(+RR)_C220S/PVA_/S267K/S364K/E3 57Q/H435R/Y436Y/K447del

SEQ ID NO: 1486 - protein, 392 aa, synthetic construct
  source 1..392: note = XENP42484 Chain 2 - mouse_IL18_3CS_K52A_(GGGGS)1_Fc(216)_IgG1_pI(-)_Isosteric_A _C220S/PVA_/S267K/L368D/K370S/K447del
NFGRLHSTTAVIRNINDQVLFVDKRQPVFEDMTDIDQSASEPQTRLIIYMYADSEVRGLAVTLSVKDSKMSTLSSKNKIISFEEMDPPENIDDIQSDLIFFQKRVPGHNKMEFESSLYEGHFLASQKEDDAFKLILKKKDENGDKSVMFTLTNLHQSGGGGSEPKSSDKTHTCPPCPAPPVAGPSVFLFPPKPKDTLMISRTPEVTCVVVDVKHEDPEVKFNWYVDGVEVHNAKTKPREEEYNSTYRVVSVLTVLHQDWLNGKEYKCKVSNKALPAPIEKTISKAKGQPREPQVYTLPPSREEMTKNQVSLTCDVSGFYPSDIAVEWESDGQPENNYKTTPPVLDSDGSFFLYSKLTVDKSRWEQGDVFSCSVMHEALHNHYTQKSLSLSPG

SEQ ID NO: 1487 - protein, 214 aa, synthetic construct; identical to SEQ ID NO: 295
  source 1..214: note = XENP42484 Chain 3 - silentFv L0

SEQ ID NO: 1488 - protein, 444 aa, synthetic construct; identical to SEQ ID NO: 386
  source 1..444: note = XENP42473 Chain 1 - silentFv_H0_Fc(216)_IgG1_ISO(+RR)_C220S/PVA_/S267K/S364K/E3 57Q/H435R/Y436Y/K447del

SEQ ID NO: 1489 - protein, 392 aa, synthetic construct
  source 1..392: note = XENP42473 Chain 2 - mouse_IL18_3CS_H6Q_(GGGGS)1_Fc(216)_IgG1_pI(-)_Isosteric_A_ C220S/PVA_/S267K/L368D/K370S/K447del
NFGRLQSTTAVIRNINDQVLFVDKRQPVFEDMTDIDQSASEPQTRLIIYMYKDSEVRGLAVTLSVKDSKMSTLSSKNKIISFEEMDPPENIDDIQSDLIFFQKRVPGHNKMEFESSLYEGHFLASQKEDDAFKLILKKKDENGDKSVMFTLTNLHQSGGGGSEPKSSDKTHTCPPCPAPPVAGPSVFLFPPKPKDTLMISRTPEVTCVVVDVKHEDPEVKFNWYVDGVEVHNAKTKPREEEYNSTYRVVSVLTVLHQDWLNGKEYKCKVSNKALPAPIEKTISKAKGQPREPQVYTLPPSREEMTKNQVSLTCDVSGFYPSDIAVEWESDGQPENNYKTTPPVLDSDGSFFLYSKLTVDKSRWEQGDVFSCSVMHEALHNHYTQKSLSLSPG

SEQ ID NO: 1490 - protein, 214 aa, synthetic construct; identical to SEQ ID NO: 295
  source 1..214: note = XENP42473 Chain 3 - silentFv L0

SEQ ID NO: 1491 - protein, 444 aa, synthetic construct; identical to SEQ ID NO: 386
  source 1..444: note = XENP42487 Chain 1 - silentFv_H0_Fc(216)_IgG1_ISO(+RR)_C220S/PVA_/S267K/S364K/E3 57Q/H435R/Y436Y/K447del

SEQ ID NO: 1492 - protein, 392 aa, synthetic construct
  source 1..392: note = XENP42487 Chain 2 - mouse_IL18_3CS_K52V_(GGGGS)1_Fc(216)_IgG1_pI(-)_Isosteric_A _C220S/PVA_/S267K/L368D/K370S/K447del
NFGRLHSTTAVIRNINDQVLFVDKRQPVFEDMTDIDQSASEPQTRLIIYMYVDSEVRGLAVTLSVKDSKMSTLSSKNKIISFEEMDPPENIDDIQSDLIFFQKRVPGHNKMEFESSLYEGHFLASQKEDDAFKLILKKKDENGDKSVMFTLTNLHQSGGGGSEPKSSDKTHTCPPCPAPPVAGPSVFLFPPKPKDTLMISRTPEVTCVVVDVKHEDPEVKFNWYVDGVEVHNAKTKPREEEYNSTYRVVSVLTVLHQDWLNGKEYKCKVSNKALPAPIEKTISKAKGQPREPQVYTLPPSREEMTKNQVSLTCDVSGFYPSDIAVEWESDGQPENNYKTTPPVLDSDGSFFLYSKLTVDKSRWEQGDVFSCSVMHEALHNHYTQKSLSLSPG

SEQ ID NO: 1493 - protein, 214 aa, synthetic construct; identical to SEQ ID NO: 295
  source 1..214: note = XENP42487 Chain 3 - silentFv L0

SEQ ID NO: 1494 - protein, 444 aa, synthetic construct; identical to SEQ ID NO: 386
  source 1..444: note = XENP42491 Chain 1 - silentFv_H0_Fc(216)_IgG1_ISO(+RR)_C220S/PVA_/S267K/S364K/E3 57Q/H435R/Y436Y/K447del

SEQ ID NO: 1495 - protein, 392 aa, synthetic construct
  source 1..392: note = XENP42491 Chain 2 - mouse_IL18_3CS_D36N_(GGGGS)1_Fc(216)_IgG1_pI(-)_Isosteric_A _C220S/PVA_/S267K/L368D/K370S/K447del
NFGRLHSTTAVIRNINDQVLFVDKRQPVFEDMTDINQSASEPQTRLIIYMYKDSEVRGLAVTLSVKDSKMSTLSSKNKIISFEEMDPPENIDDIQSDLIFFQKRVPGHNKMEFESSLYEGHFLASQKEDDAFKLILKKKDENGDKSVMFTLTNLHQSGGGGSEPKSSDKTHTCPPCPAPPVAGPSVFLFPPKPKDTLMISRTPEVTCVVVDVKHEDPEVKFNWYVDGVEVHNAKTKPREEEYNSTYRVVSVLTVLHQDWLNGKEYKCKVSNKALPAPIEKTISKAKGQPREPQVYTLPPSREEMTKNQVSLTCDVSGFYPSDIAVEWESDGQPENNYKTTPPVLDSDGSFFLYSKLTVDKSRWEQGDVFSCSVMHEALHNHYTQKSLSLSPG

SEQ ID NO: 1496 - protein, 214 aa, synthetic construct; identical to SEQ ID NO: 295
  source 1..214: note = XENP42491 Chain 3 - silentFv L0

SEQ ID NO: 1497 - protein, 444 aa, synthetic construct; identical to SEQ ID NO: 386
  source 1..444: note = XENP43095 Chain 1 - silentFv_H0_Fc(216)_IgG1_PVA_/S267K/S364K/E357Q/H435R/Y436F /K447del

SEQ ID NO: 1498 - protein, 392 aa, synthetic construct
  source 1..392: note = XENP43095 Chain 2 - mouse_IL18_3CS_A10C_M50G_L59K_N153C_(GGGGS)1_Fc(216)_IgG1_p I(-)_Isosteric_A_C220S/PVA_/S267K/L368D/K370S/K447del
NFGRLHSTTCVIRNINDQVLFVDKRQPVFEDMTDIDQSASEPQTRLIIYGYKDSEVRGKAVTLSVKDSKMSTLSSKNKIISFEEMDPPENIDDIQSDLIFFQKRVPGHNKMEFESSLYEGHFLASQKEDDAFKLILKKKDENGDKSVMFTLTCLHQSGGGGSEPKSSDKTHTCPPCPAPPVAGPSVFLFPPKPKDTLMISRTPEVTCVVVDVKHEDPEVKFNWYVDGVEVHNAKTKPREEEYNSTYRVVSVLTVLHQDWLNGKEYKCKVSNKALPAPIEKTISKAKGQPREPQVYTLPPSREEMTKNQVSLTCDVSGFYPSDIAVEWESDGQPENNYKTTPPVLDSDGSFFLYSKLTVDKSRWEQGDVFSCSVMHEALHNHYTQKSLSLSPG

SEQ ID NO: 1499 - protein, 214 aa, synthetic construct; identical to SEQ ID NO: 295
  source 1..214: note = XENP43095 Chain 3 - silentFv L0

SEQ ID NO: 1500 - protein, 444 aa, synthetic construct; identical to SEQ ID NO: 386
  source 1..444: note = XENP43098 Chain 1 - silentFv_H0_Fc(216)_IgG1_PVA_/S267K/S364K/E357Q/H435R/Y436F /K447del

SEQ ID NO: 1501 - protein, 392 aa, synthetic construct
  source 1..392: note = XENP43098 Chain 2 - mouse_IL18_3CS_A10C_M50G_K52A_E55R_L59K_N153C_(GGGGS)1_Fc(2 16)_IgG1_pI(-)_Isosteric_A_C220S/PVA_/S267K/L368D/K370S/K44 7del
NFGRLHSTTCVIRNINDQVLFVDKRQPVFEDMTDIDQSASEPQTRLIIYGYADSRVRGKAVTLSVKDSKMSTLSSKNKIISFEEMDPPENIDDIQSDLIFFQKRVPGHNKMEFESSLYEGHFLASQKEDDAFKLILKKKDENGDKSVMFTLTCLHQSGGGGSEPKSSDKTHTCPPCPAPPVAGPSVFLFPPKPKDTLMISRTPEVTCVVVDVKHEDPEVKFNWYVDGVEVHNAKTKPREEEYNSTYRVVSVLTVLHQDWLNGKEYKCKVSNKALPAPIEKTISKAKGQPREPQVYTLPPSREEMTKNQVSLTCDVSGFYPSDIAVEWESDGQPENNYKTTPPVLDSDGSFFLYSKLTVDKSRWEQGDVFSCSVMHEALHNHYTQKSLSLSPG

SEQ ID NO: 1502 - protein, 214 aa, synthetic construct; identical to SEQ ID NO: 295
  source 1..214: note = XENP43098 Chain 3 - silentFv L0

SEQ ID NO: 1503 - protein, 444 aa, synthetic construct; identical to SEQ ID NO: 386
  source 1..444: note = XENP43090 Chain 1 - silentFv_H0_Fc(216)_IgG1_PVA_/S267K/S364K/E357Q/H435R/Y436F /K447del

SEQ ID NO: 1504 - protein, 392 aa, synthetic construct
  source 1..392: note = XENP43090 Chain 2 - mouse_IL18_3CS_A10C_V56A_N153C_(GGGGS)1_Fc(216)_IgG1_pI(-)_ Isosteric_A_C220S/PVA_/S267K/L368D/K370S/K447del
NFGRLHSTTCVIRNINDQVLFVDKRQPVFEDMTDIDQSASEPQTRLIIYMYKDSEARGLAVTLSVKDSKMSTLSSKNKIISFEEMDPPENIDDIQSDLIFFQKRVPGHNKMEFESSLYEGHFLASQKEDDAFKLILKKKDENGDKSVMFTLTCLHQSGGGGSEPKSSDKTHTCPPCPAPPVAGPSVFLFPPKPKDTLMISRTPEVTCVVVDVKHEDPEVKFNWYVDGVEVHNAKTKPREEEYNSTYRVVSVLTVLHQDWLNGKEYKCKVSNKALPAPIEKTISKAKGQPREPQVYTLPPSREEMTKNQVSLTCDVSGFYPSDIAVEWESDGQPENNYKTTPPVLDSDGSFFLYSKLTVDKSRWEQGDVFSCSVMHEALHNHYTQKSLSLSPG

SEQ ID NO: 1505 - protein, 214 aa, synthetic construct; identical to SEQ ID NO: 295
  source 1..214: note = XENP43090 Chain 3 - silentFv L0

SEQ ID NO: 1506 - protein, 444 aa, synthetic construct; identical to SEQ ID NO: 386
  source 1..444: note = XENP43086 Chain 1 - silentFv_H0_Fc(216)_IgG1_PVA_/S267K/S364K/E357Q/H435R/Y436F /K447del

SEQ ID NO: 1507 - protein, 392 aa, synthetic construct
  source 1..392: note = XENP43086 Chain 2 - mouse_IL18_3CS_A10C_M50G_N153C_(GGGGS)1_Fc(216)_IgG1_pI(-)_ Isosteric_A_C220S/PVA_/S267K/L368D/K370S/K447del
NFGRLHSTTCVIRNINDQVLFVDKRQPVFEDMTDIDQSASEPQTRLIIYGYKDSEVRGLAVTLSVKDSKMSTLSSKNKIISFEEMDPPENIDDIQSDLIFFQKRVPGHNKMEFESSLYEGHFLASQKEDDAFKLILKKKDENGDKSVMFTLTCLHQSGGGGSEPKSSDKTHTCPPCPAPPVAGPSVFLFPPKPKDTLMISRTPEVTCVVVDVKHEDPEVKFNWYVDGVEVHNAKTKPREEEYNSTYRVVSVLTVLHQDWLNGKEYKCKVSNKALPAPIEKTISKAKGQPREPQVYTLPPSREEMTKNQVSLTCDVSGFYPSDIAVEWESDGQPENNYKTTPPVLDSDGSFFLYSKLTVDKSRWEQGDVFSCSVMHEALHNHYTQKSLSLSPG

SEQ ID NO: 1508 - protein, 214 aa, synthetic construct; identical to SEQ ID NO: 295
  source 1..214: note = XENP43086 Chain 3 - silentFv L0

SEQ ID NO: 1509 - protein, 444 aa, synthetic construct; identical to SEQ ID NO: 386
  source 1..444: note = XENP43087 Chain 1 - silentFv_H0_Fc(216)_IgG1_PVA_/S267K/S364K/E357Q/H435R/Y436F /K447del

SEQ ID NO: 1510 - protein, 392 aa, synthetic construct
  source 1..392: note = XENP43087 Chain 2 - mouse_IL18_3CS_A10C_M50A_N153C_(GGGGS)1_Fc(216)_IgG1_pI(-)_ Isosteric_A_C220S/PVA_/S267K/L368D/K370S/K447del
NFGRLHSTTCVIRNINDQVLFVDKRQPVFEDMTDIDQSASEPQTRLIIYAYKDSEVRGLAVTLSVKDSKMSTLSSKNKIISFEEMDPPENIDDIQSDLIFFQKRVPGHNKMEFESSLYEGHFLASQKEDDAFKLILKKKDENGDKSVMFTLTCLHQSGGGGSEPKSSDKTHTCPPCPAPPVAGPSVFLFPPKPKDTLMISRTPEVTCVVVDVKHEDPEVKFNWYVDGVEVHNAKTKPREEEYNSTYRVVSVLTVLHQDWLNGKEYKCKVSNKALPAPIEKTISKAKGQPREPQVYTLPPSREEMTKNQVSLTCDVSGFYPSDIAVEWESDGQPENNYKTTPPVLDSDGSFFLYSKLTVDKSRWEQGDVFSCSVMHEALHNHYTQKSLSLSPG

SEQ ID NO: 1511 - protein, 214 aa, synthetic construct; identical to SEQ ID NO: 295
  source 1..214: note = XENP43087 Chain 3 - silentFv L0

SEQ ID NO: 1512 - protein, 444 aa, synthetic construct; identical to SEQ ID NO: 386
  source 1..444: note = XENP43091 Chain 1 - silentFv_H0_Fc(216)_IgG1_PVA_/S267K/S364K/E357Q/H435R/Y436F /K447del

SEQ ID NO: 1513 - protein, 392 aa, synthetic construct
  source 1..392: note = XENP43091 Chain 2 - mouse_IL18_3CS_A10C_V56R_N153C_(GGGGS)1_Fc(216)_IgG1_pI(-)_ Isosteric_A_C220S/PVA_/S267K/L368D/K370S/K447del
NFGRLHSTTCVIRNINDQVLFVDKRQPVFEDMTDIDQSASEPQTRLIIYMYKDSERRGLAVTLSVKDSKMSTLSSKNKIISFEEMDPPENIDDIQSDLIFFQKRVPGHNKMEFESSLYEGHFLASQKEDDAFKLILKKKDENGDKSVMFTLTCLHQSGGGGSEPKSSDKTHTCPPCPAPPVAGPSVFLFPPKPKDTLMISRTPEVTCVVVDVKHEDPEVKFNWYVDGVEVHNAKTKPREEEYNSTYRVVSVLTVLHQDWLNGKEYKCKVSNKALPAPIEKTISKAKGQPREPQVYTLPPSREEMTKNQVSLTCDVSGFYPSDIAVEWESDGQPENNYKTTPPVLDSDGSFFLYSKLTVDKSRWEQGDVFSCSVMHEALHNHYTQKSLSLSPG

SEQ ID NO: 1514 - protein, 214 aa, synthetic construct; identical to SEQ ID NO: 295
  source 1..214: note = XENP43091 Chain 3 - silentFv L0

SEQ ID NO: 1515 - protein, 444 aa, synthetic construct; identical to SEQ ID NO: 386
  source 1..444: note = XENP43100 Chain 1 - silentFv_H0_Fc(216)_IgG1_PVA_/S267K/S364K/E357Q/H435R/Y436F /K447del

SEQ ID NO: 1516 - protein, 392 aa, synthetic construct
  source 1..392: note = XENP43100 Chain 2 - mouse_IL18_3CS_A10C_D34N_M50G_K52V_E55R_L59K_N153C_(GGGGS)1 _Fc(216)_IgG1_pI(-)_Isosteric_A_C220S/PVA_/S267K/L368D/K370 S/K447del
NFGRLHSTTCVIRNINDQVLFVDKRQPVFEDMTNIDQSASEPQTRLIIYGYVDSRVRGKAVTLSVKDSKMSTLSSKNKIISFEEMDPPENIDDIQSDLIFFQKRVPGHNKMEFESSLYEGHFLASQKEDDAFKLILKKKDENGDKSVMFTLTCLHQSGGGGSEPKSSDKTHTCPPCPAPPVAGPSVFLFPPKPKDTLMISRTPEVTCVVVDVKHEDPEVKFNWYVDGVEVHNAKTKPREEEYNSTYRVVSVLTVLHQDWLNGKEYKCKVSNKALPAPIEKTISKAKGQPREPQVYTLPPSREEMTKNQVSLTCDVSGFYPSDIAVEWESDGQPENNYKTTPPVLDSDGSFFLYSKLTVDKSRWEQGDVFSCSVMHEALHNHYTQKSLSLSPG

SEQ ID NO: 1517 - protein, 214 aa, synthetic construct; identical to SEQ ID NO: 295
  source 1..214: note = XENP43100 Chain 3 - silentFv L0

SEQ ID NO: 1518 - protein, 444 aa, synthetic construct; identical to SEQ ID NO: 386
  source 1..444: note = XENP43104 Chain 1 - silentFv_H0_Fc(216)_IgG1_PVA_/S267K/S364K/E357Q/H435R/Y436F /K447del

SEQ ID NO: 1519 - protein, 392 aa, synthetic construct
  source 1..392: note = XENP43104 Chain 2 - mouse_IL18_3CS_A10C_D34N_M50G_K52D_E55R_L59K_N153C_(GGGGS)1 _Fc(216)_IgG1_pI(-)_Isosteric_A_C220S/PVA_/S267K/L368D/K370 S/K447del
NFGRLHSTTCVIRNINDQVLFVDKRQPVFEDMTNIDQSASEPQTRLIIYGYDDSRVRGKAVTLSVKDSKMSTLSSKNKIISFEEMDPPENIDDIQSDLIFFQKRVPGHNKMEFESSLYEGHFLASQKEDDAFKLILKKKDENGDKSVMFTLTCLHQSGGGGSEPKSSDKTHTCPPCPAPPVAGPSVFLFPPKPKDTLMISRTPEVTCVVVDVKHEDPEVKFNWYVDGVEVHNAKTKPREEEYNSTYRVVSVLTVLHQDWLNGKEYKCKVSNKALPAPIEKTISKAKGQPREPQVYTLPPSREEMTKNQVSLTCDVSGFYPSDIAVEWESDGQPENNYKTTPPVLDSDGSFFLYSKLTVDKSRWEQGDVFSCSVMHEALHNHYTQKSLSLSPG

SEQ ID NO: 1520 - protein, 214 aa, synthetic construct; identical to SEQ ID NO: 295
  source 1..214: note = XENP43104 Chain 3 - silentFv L0

SEQ ID NO: 1521 - protein, 444 aa, synthetic construct; identical to SEQ ID NO: 386
  source 1..444: note = XENP43093 Chain 1 - silentFv_H0_Fc(216)_IgG1_PVA_/S267K/S364K/E357Q/H435R/Y436F /K447del

SEQ ID NO: 1522 - protein, 392 aa, synthetic construct
  source 1..392: note = XENP43093 Chain 2 - mouse_IL18_3CS_A10C_E55R_L59K_N153C_(GGGGS)1_Fc(216)_IgG1_p I(-)_Isosteric_A_C220S/PVA_/S267K/L368D/K370S/K447del
NFGRLHSTTCVIRNINDQVLFVDKRQPVFEDMTDIDQSASEPQTRLIIYMYKDSRVRGKAVTLSVKDSKMSTLSSKNKIISFEEMDPPENIDDIQSDLIFFQKRVPGHNKMEFESSLYEGHFLASQKEDDAFKLILKKKDENGDKSVMFTLTCLHQSGGGGSEPKSSDKTHTCPPCPAPPVAGPSVFLFPPKPKDTLMISRTPEVTCVVVDVKHEDPEVKFNWYVDGVEVHNAKTKPREEEYNSTYRVVSVLTVLHQDWLNGKEYKCKVSNKALPAPIEKTISKAKGQPREPQVYTLPPSREEMTKNQVSLTCDVSGFYPSDIAVEWESDGQPENNYKTTPPVLDSDGSFFLYSKLTVDKSRWEQGDVFSCSVMHEALHNHYTQKSLSLSPG

SEQ ID NO: 1523 - protein, 214 aa, synthetic construct; identical to SEQ ID NO: 295
  source 1..214: note = XENP43093 Chain 3 - silentFv L0

SEQ ID NO: 1524 - protein, 444 aa, synthetic construct; identical to SEQ ID NO: 386
  source 1..444: note = XENP43096 Chain 1 - silentFv_H0_Fc(216)_IgG1_PVA_/S267K/S364K/E357Q/H435R/Y436F /K447del

SEQ ID NO: 1525 - protein, 392 aa, synthetic construct
  source 1..392: note = XENP43096 Chain 2 - mouse_IL18_3CS_A10C_M50G_E55R_L59K_N153C_(GGGGS)1_Fc(216)_I gG1_pI(-)_Isosteric_A_C220S/PVA_/S267K/L368D/K370S/K447del
NFGRLHSTTCVIRNINDQVLFVDKRQPVFEDMTDIDQSASEPQTRLIIYGYKDSRVRGKAVTLSVKDSKMSTLSSKNKIISFEEMDPPENIDDIQSDLIFFQKRVPGHNKMEFESSLYEGHFLASQKEDDAFKLILKKKDENGDKSVMFTLTCLHQSGGGGSEPKSSDKTHTCPPCPAPPVAGPSVFLFPPKPKDTLMISRTPEVTCVVVDVKHEDPEVKFNWYVDGVEVHNAKTKPREEEYNSTYRVVSVLTVLHQDWLNGKEYKCKVSNKALPAPIEKTISKAKGQPREPQVYTLPPSREEMTKNQVSLTCDVSGFYPSDIAVEWESDGQPENNYKTTPPVLDSDGSFFLYSKLTVDKSRWEQGDVFSCSVMHEALHNHYTQKSLSLSPG

SEQ ID NO: 1526 - protein, 214 aa, synthetic construct; identical to SEQ ID NO: 295
  source 1..214: note = XENP43096 Chain 3 - silentFv L0

SEQ ID NO: 1527 - protein, 444 aa, synthetic construct; identical to SEQ ID NO: 386
  source 1..444: note = XENP43099 Chain 1 - silentFv_H0_Fc(216)_IgG1_PVA_/S267K/S364K/E357Q/H435R/Y436F /K447del

SEQ ID NO: 1528 - protein, 392 aa, synthetic construct
  source 1..392: note = XENP43099 Chain 2 - mouse_IL18_3CS_A10C_M50G_K52D_E55R_L59K_N153C_(GGGGS)1_Fc(2 16)_IgG1_pI(-)_Isosteric_A_C220S/PVA_/S267K/L368D/K370S/K44 7del
NFGRLHSTTCVIRNINDQVLFVDKRQPVFEDMTDIDQSASEPQTRLIIYGYDDSRVRGKAVTLSVKDSKMSTLSSKNKIISFEEMDPPENIDDIQSDLIFFQKRVPGHNKMEFESSLYEGHFLASQKEDDAFKLILKKKDENGDKSVMFTLTCLHQSGGGGSEPKSSDKTHTCPPCPAPPVAGPSVFLFPPKPKDTLMISRTPEVTCVVVDVKHEDPEVKFNWYVDGVEVHNAKTKPREEEYNSTYRVVSVLTVLHQDWLNGKEYKCKVSNKALPAPIEKTISKAKGQPREPQVYTLPPSREEMTKNQVSLTCDVSGFYPSDIAVEWESDGQPENNYKTTPPVLDSDGSFFLYSKLTVDKSRWEQGDVFSCSVMHEALHNHYTQKSLSLSPG

SEQ ID NO: 1529 - protein, 214 aa, synthetic construct; identical to SEQ ID NO: 295
  source 1..214: note = XENP43099 Chain 3 - silentFv L0

SEQ ID NO: 1530 - protein, 444 aa, synthetic construct; identical to SEQ ID NO: 386
  source 1..444: note = XENP40975 Chain 1 - silentFv_H0_Fc(216)_IgG1_PVA_/S267K/S364K/E357Q/H435R/Y436F /K447del

SEQ ID NO: 1531 - protein, 392 aa, synthetic construct
  source 1..392: note = XENP40975 Chain 2 - mouse_IL18_CS2_3CS_(GGGGS)1_Fc(216)_IgG1_pI(-)_Isosteric_A_ C220S/PVA_/S267K/L368D/K370S/K447del
HFGRLHSTTAVIRNINDQVLFVDKRQPVFEDMTDIDQSASEPQTRLIIYAYGDSRARGKAVTLSVKDSKMSTLSSKNKIISFEEMDPPENIDDIQSDLIFFQKRVPGHNKMEFESSLYEGHFLASQKEDDAFKLILKKKDENGDKSVMFTLTNLHQSGGGGSEPKSSDKTHTCPPCPAPPVAGPSVFLFPPKPKDTLMISRTPEVTCVVVDVKHEDPEVKFNWYVDGVEVHNAKTKPREEEYNSTYRVVSVLTVLHQDWLNGKEYKCKVSNKALPAPIEKTISKAKGQPREPQVYTLPPSREEMTKNQVSLTCDVSGFYPSDIAVEWESDGQPENNYKTTPPVLDSDGSFFLYSKLTVDKSRWEQGDVFSCSVMHEALHNHYTQKSLSLSPG

SEQ ID NO: 1532 - protein, 214 aa, synthetic construct; identical to SEQ ID NO: 295
  source 1..214: note = XENP40975 Chain 3 - silentFv L0

SEQ ID NO: 1533 - protein, 444 aa, synthetic construct; identical to SEQ ID NO: 386
  source 1..444: note = XENP43101 Chain 1 - silentFv_H0_Fc(216)_IgG1_PVA_/S267K/S364K/E357Q/H435R/Y436F /K447del

SEQ ID NO: 1534 - protein, 392 aa, synthetic construct
  source 1..392: note = XENP43101 Chain 2 - mouse_IL18_3CS_A10C_E30Q_M50G_K52V_E55R_L59K_N153C_(GGGGS)1 _Fc(216)_IgG1_pI(-)_Isosteric_A_C220S/PVA_/S267K/L368D/K370 S/K447del
NFGRLHSTTCVIRNINDQVLFVDKRQPVFQDMTDIDQSASEPQTRLIIYGYVDSRVRGKAVTLSVKDSKMSTLSSKNKIISFEEMDPPENIDDIQSDLIFFQKRVPGHNKMEFESSLYEGHFLASQKEDDAFKLILKKKDENGDKSVMFTLTCLHQSGGGGSEPKSSDKTHTCPPCPAPPVAGPSVFLFPPKPKDTLMISRTPEVTCVVVDVKHEDPEVKFNWYVDGVEVHNAKTKPREEEYNSTYRVVSVLTVLHQDWLNGKEYKCKVSNKALPAPIEKTISKAKGQPREPQVYTLPPSREEMTKNQVSLTCDVSGFYPSDIAVEWESDGQPENNYKTTPPVLDSDGSFFLYSKLTVDKSRWEQGDVFSCSVMHEALHNHYTQKSLSLSPG

SEQ ID NO: 1535 - protein, 214 aa, synthetic construct; identical to SEQ ID NO: 295
  source 1..214: note = XENP43101 Chain 3 - silentFv L0

SEQ ID NO: 1536 - protein, 444 aa, synthetic construct; identical to SEQ ID NO: 386
  source 1..444: note = XENP43105 Chain 1 - silentFv_H0_Fc(216)_IgG1_PVA_/S267K/S364K/E357Q/H435R/Y436F /K447del

SEQ ID NO: 1537 - protein, 392 aa, synthetic construct
  source 1..392: note = XENP43105 Chain 2 - mouse_IL18_3CS_A10C_E30Q_M50G_K52D_E55R_L59K_N153C_(GGGGS)1 _Fc(216)_IgG1_pI(-)_Isosteric_A_C220S/PVA_/S267K/L368D/K370 S/K447del
NFGRLHSTTCVIRNINDQVLFVDKRQPVFQDMTDIDQSASEPQTRLIIYGYDDSRVRGKAVTLSVKDSKMSTLSSKNKIISFEEMDPPENIDDIQSDLIFFQKRVPGHNKMEFESSLYEGHFLASQKEDDAFKLILKKKDENGDKSVMFTLTCLHQSGGGGSEPKSSDKTHTCPPCPAPPVAGPSVFLFPPKPKDTLMISRTPEVTCVVVDVKHEDPEVKFNWYVDGVEVHNAKTKPREEEYNSTYRVVSVLTVLHQDWLNGKEYKCKVSNKALPAPIEKTISKAKGQPREPQVYTLPPSREEMTKNQVSLTCDVSGFYPSDIAVEWESDGQPENNYKTTPPVLDSDGSFFLYSKLTVDKSRWEQGDVFSCSVMHEALHNHYTQKSLSLSPG

SEQ ID NO: 1538 - protein, 214 aa, synthetic construct; identical to SEQ ID NO: 295
  source 1..214: note = XENP43105 Chain 3 - silentFv L0

SEQ ID NO: 1539 - protein, 444 aa, synthetic construct; identical to SEQ ID NO: 386
  source 1..444: note = XENP40974 Chain 1 - silentFv_H0_Fc(216)_IgG1_PVA_/S267K/S364K/E357Q/H435R/Y436F /K447del

SEQ ID NO: 1540 - protein, 392 aa, synthetic construct; identical to SEQ ID NO: 1408
  source 1..392: note = XENP40974 Chain 2 - mouse_IL18_CS1_3CS_(GGGGS)1_Fc(216)_IgG1_pI(-)_Isosteric_A_ C220S/PVA_/S267K/L368D/K370S/K447del

SEQ ID NO: 1541 - protein, 214 aa, synthetic construct; identical to SEQ ID NO: 295
  source 1..214: note = XENP40974 Chain 3 - silentFv L0

1. A composition comprising a variant human IL18 protein, wherein the variant IL18 protein comprises a modification at one or more amino acid positions selected from the group consisting of Y1, E6, S7, K8, S10, V11, N14, L15, D17, Q18, D23, R27, P28, L29, E31, M33, T34, D35, S36, D37, C38, R39, D40, N41, R44, I46, I49, S50, M51, K53, D54, S55, Q56, P57, M60, A61, V62, T63, S65, K67, C68, E69, I71, C76, E77, I80, I81, N87, P88, D90, K93, T95, K96, S97, Q103, H109, D110, N111, M113, S119, A126, C127, D132, L136, L138, K139, E141, L144, D146, R147, I149, M150, N155, E156, and D157, as compared to wildtype human IL18.

2.-15. (canceled)

16. A monovalent Fc fusion protein comprising:
(a) a first monomer comprising from N-terminus to C-terminus: a wildtype or variant IL-18 protein and a first Fc domain; and
(b) a second monomer comprising a second Fc domain.

17.-33. (canceled)

34. A monovalent Fc fusion protein comprising:
(a) a first monomer comprising from N-terminus to C-terminus: a variant IL-18 protein and a first Fc domain, wherein the variant human IL-18 protein comprises amino acid substitutions 4CS/E6Q/S10C/K53D/N111T/N155C, and wherein the variant IL-18 protein is covalently attached to the N-terminus of the first Fc domain; and
(b) a second monomer comprising a second Fc domain, wherein the first Fc domain comprises amino acid substitutions C220S/PVA JS267K/L368D/K370S/M428LJN434S, and the second Fc domain comprises amino acid substitutions PVA_/S267K/S364K/E357Q/M428L/N434S, according to EU numbering.

35.-38. (canceled)

39. A Fab-Fc fusion protein comprising:
(a) a first monomer comprising from N-terminus to C-terminus: a variable heavy (VH) chain and a first Fc domain;
(b) a second monomer comprising from N-terminus to C-terminus: a wildtype or variant IL-18 protein and a second Fc domain; and
(c) a third monomer comprising a variable light (VL) chain, wherein the VH and VL form an antigen binding fragment (Fab).

40.-56. (canceled)

57. A Fab-Fc fusion protein comprising:
(a) a first monomer comprising from N-terminus to C-terminus: a variable heavy (VH) chain and a first Fc domain;
(b) a second monomer comprising from N-terminus to C-terminus: a variant IL-18 protein and a second Fc domain, wherein the variant human IL-18 protein comprises amino acid substitutions 4CS/E6Q/S10C/K53D/N111T/N155C; and
(c) a third monomer comprising a variable light (VL) chain, wherein the VH and VL form an antigen binding fragment (Fab),
wherein the first Fc domain comprises amino acid substitutions C220S/PVA JS267K/L368D/K370S/M428LJN434S, and the second Fc domain comprises amino acid substitutions PVA JS267K/S364K/E357Q/M428L/N434S, according to EU numbering.

58.-65. (canceled)
